(19) United States
(12) Patent Application Publication
(10) Pub. No.: US 2017/0130245 A1
(43) Pub. Date: May 11, 2017

(54) CHIMERIC CAPSIDS

(71) Applicant: VOYAGER THERAPEUTICS, INC., Cambridge, MA (US)

(72) Inventors: Robert KOTIN, Boston, MA (US); Jinzhao HOU, Belmont, MA (US); James MCLAUGHLIN, Cambridge, MA (US)

(21) Appl. No.: 15/317,448

(22) PCT Filed: Jun. 9, 2015
(86) PCT No.: PCT/US15/34799

§ 371 Date: Dec. 9, 2016

Related U.S. Application Data
(60) Provisional application No. 62/009,430, filed on Jun. 9, 2014.
(60) Provisional application No. 62/009,435, filed on Jun. 9, 2014.

(51) Int. Cl. C12N 15/86; C07K 14/005

(52) U.S. Cl. CPC C12N 15/86; C07K 14/005; C12N 2750/14122; C12N 2750/14143

(57) ABSTRACT

The present invention relates to viral vectors and methods of their production and use.

### REFERENCE TO RELATED APPLICATIONS

[0001] This application claims priority to U.S. Provisional Patent Application No. 62/009,430, filed Jun. 9, 2014, entitled Chimeric Capsids and U.S. Provisional Patent Application No. 62/009,435, filed Jun. 9, 2014, entitled Compositions and Methods for Viral Vector Production; the contents of each of which is herein incorporated by reference in its entirety.

### REFERENCE TO THE SEQUENCE LISTING

[0002] The present application is being filed along with a Sequence Listing in electronic format. The Sequence Listing is provided as a file entitled 20571008PCT_SL.txt, created on Jun. 9, 2015 which is 1,770,367 bytes in size. The information in the electronic format of the sequence listing is incorporated herein by reference in its entirety.

### FIELD OF THE INVENTION

[0003] The present invention relates to compositions and methods for viral vector production and therapeutic uses of these viral vectors.

### BACKGROUND OF THE INVENTION

[0004] Viruses of the Parvoviridae family are small non-enveloped icosahedral capsid viruses characterized by a single stranded DNA genome. Parvoviridae family viruses consist of two subfamilies: Parvovirinae, which infect vertebrates, and Densovirinae, which infect invertebrates.

[0005] Viruses of the Parvoviridae family are used as biological tools due to a relatively simple structure that may be easily manipulated with standard molecular biology techniques. The genome of the virus may be modified to contain a minimum of components for the assembly of a functional recombinant virus, or viral vector, which is loaded with or engineered to express or deliver a desired nucleic acid construct, e.g., a transgene, polypeptide-encoding polynucleotide or modulatory nucleic acid, which may be delivered to a target cell, tissue or organism.

[0006] Parvoviridae viral vectors are adaptable to the delivery of a wide range of nucleic acid constructs and are therefore often produced in the laboratory in small volumes with a variable concentration of viral particles. It is well understood, however, that viral vector production for larger scale clinical trials and commercialization using current cell production systems can be cost and time prohibitive. According to U.S. Pat. No. 6,723,551, a typical clinical study may require the production of more than 10¹⁵ viral vector particles. At a production rate of 10,000 viral vector particles per cell, transfection and culture of approximately 10¹¹ cells would require the equivalent of 5,000 175-cm² flasks of cells without taking into account loss of yield during the purification process. In addition, producing viral vectors for clinical use requires purification strategies to eliminate contaminants that may be present in a viral replication cell.

[0007] In view of these and other issues there remains a need for alternative and improved methods for efficiently, safely, and economically producing a large amount of viral vectors. The present invention provides compositions and methods for the improved production of viral vectors, e.g., parvoviral vectors, and consequently more efficacious therapeutic modalities.

### SUMMARY OF THE INVENTION

[0008] The present invention provides compositions and methods for viral vector production and for improved compositions for capsid design and production. Also provided are engineered constructs useful for viral production methods and as therapeutic modalities which employ viral delivery methods.

[0009] The present invention provides methods of producing viral vectors which comprise one or more chimeric polynucleotides or polypeptides, e.g., chimeric capsid proteins, and/or chimeric genomes and/or chimeric ITRs and/or chimeric regulatory proteins and/or chimeric payloads or any combination thereof.

### BRIEF DESCRIPTION OF THE FIGURES

[0010] The foregoing and other objects, features and advantages will be apparent from the following description of particular embodiments of the invention, as illustrated in the accompanying drawings. The drawings are not necessarily to scale, emphasis instead being placed upon illustrating the principles of various embodiments of the invention.

[0011] FIG. 1 is a flowchart diagram depicting the steps involved in one method of large scale viral vector production using a baculoviral system.

[0012] FIG. 2 is a diagram depicting the production of viral vector in a baculoviral system using a viral expression construct and a payload construct vector.

[0013] FIG. 3 is a diagram depicting the production of viral vector in a viral replication cell, using a viral expression construct and a payload construct vector, and subsequent delivery of the payload construct (recombinant viral construct) to a target cell.

[0014] FIG. 4 is a protein alignment of representative AAV capsid VP3 sequences including a consensus (SEQ ID NO: 429) and AAV2 (SEQ ID NO: 430), AAV1 (SEQ ID NO: 431), AAV5 (SEQ ID NO: 432), AAV8 (SEQ ID NO: 433) and AAV9 (SEQ ID NO: 434), showing structural variable regions (VR) designated VRI-VRIX and HI Loop. In FIG. 4, the amino acids in the variable regions VRI to VRIX and the HI Loop are denoted by the boxes and corresponding text. For example, VRI for the VP3 sequence of AAV2 is amino acid 57 to 67 of AAV2 VP3 sequence.

[0015] FIG. 5 is a 3-dimensional protein backbone overlay diagram of certain AAV capsid sequences of FIG. 4. The black arrows indicate variable regions (VR) that are visible in one rotational aspect, and these are arbitrarily labeled a-h.

[0016] FIG. 6 is a protein alignment of VP1 sequences from selected AAV capsids with central nervous system (CNS) tropism aligned to AAV2 (SEQ ID NO: 435), including AAV7 (SEQ ID NO: 442), AAV8 (SEQ ID NO: 440), AAVrh8 (SEQ ID NO: 437), AAV9 (SEQ ID NO: 436), AAVrh10 (SEQ ID NO: 438), AAVrh39 (SEQ ID NO: 439), and AAVrh43 (SEQ ID NO: 441), showing structural variable regions (VR) designated VRI-CNS to VRXII-CNS. In FIG. 6, the amino acids in the variable regions VRI-CNS to VRXII-CNS are denoted by the boxes and corresponding text. For example, VRI-CNS for the VP1 sequence of AAV2 is amino acid 13 to 42.

[0017] FIG. 7 is a 3-dimensional protein backbone overlay diagram of certain AAV capsid sequences of FIG. 6. The red arrows indicate variable regions (VR) that are visible in one or two rotational aspects, and these VRs are arbitrarily labeled a-1.

[0018] FIG. 8 is a schematic illustrating one embodiment of chimeric capsid engineering involving a region from a donor sequence inserted into an acceptor capsid to produce a resultant chimera. Variable regions and the HI loop are depicted using hashed and/or checkered fill.

[0019] FIG. 9 is a diagram depicting the design scheme for chimeric capsid generation using sequences from AAV8, AAV9, AAV10, AAV-DJ, and AAVrh8 inserted into the VRI region of the AAV2 sequence. In this diagram the residue numbering refers to the VP1 sequence. The left group of three chimeric capsids are examples of capsid region swapping. In the top example, an 8 amino acid VR1 region of the AAV8 capsid, residues 262-269, replaces the five amino acid VR1 region (residues 263-267) of the AAV2 capsid. The right group of three chimeric capsids are examples of capsid insertions. In the top example, 2 amino acid residues from the VR1 region of the AAV8 capsid, residues 262-263, are inserted between residues 261 and 262 in the VR1 region of the AAV2 capsid. FIG. 9 discloses SEQ ID NOs. 443-445, respectively, in order of appearance.

[0020] FIG. 10 is a diagram depicting the design scheme for chimeric capsid generation using sequences from AAV8, AAV9, AAVrh8, AAVrh10, and AAV-DJ, inserted into the VRIV region of the AAV2 sequence. In this diagram the residue numbering refers to the VP1 sequence. The left group of three chimeric capsids and the right top two chimeric capsids are examples of capsid swapping. In the top left example, an 11 amino acid VRIV region of the AAV8 capsid, residues 262-269, replaces the 11 amino acid VRIV region 451-459 of the AAV2 capsid. The bottom right chimeric capsid is an example of a capsid deletion. The glycine amino acid residue at position 453 in the VRIV region of the AAV2 capsid is deleted. Such deletion may impart beneficial properties to the capsid such as tropism or stability. FIG. 10 discloses SEQ ID NOs. 446-450, respectively, in order of appearance.

### DETAILED DESCRIPTION

[0021] Parvoviridae family viruses consist of two subfamilies: Parvovirinae, which infect vertebrates, and Densovirinae, which infect invertebrates. The parvoviruses and other members of the Parvoviridae family are generally described in Kenneth I. Berns, “Parvoviridae: The Viruses and Their Replication,” Chapter 69 in FIELDS VIROLOGY (3d Ed. 1996), the contents of which is incorporated by reference in its entirety.

[0022] Dependoviruses include the viral family of the adeno-associated viruses (AAV) which are capable of replication in vertebrate hosts including, but not limited to, human, primate, bovine, canine, equine, and ovine species.

[0023] AAVs have emerged as one of the most widely studied and utilized viral vectors for gene transfer to mammalian cells. See, e.g., Tratschin et al., Mol. Cell Biol., 5(11):3251-3260 (1985) and Grimm et al., Hum. Gene Ther., 10(15):2445-2450 (1999), the contents of which are herein incorporated by reference in its entirety.

[0024] According to the present invention, viral vectors for use in therapeutics and/or diagnostics comprise a virus that has been distilled or reduced to the minimum components necessary for transduction of a nucleic acid payload or cargo of interest.

[0025] In this manner, viral vectors are engineered as vehicles for specific delivery while lacking the deleterious replication and/or integration features found in a wild-type virus.

[0026] As used herein, a “vector” is any molecule or moiety which transports, transduces or otherwise acts as a carrier of a heterologous molecule. A “viral vector” is a vector which comprises one or more polynucleotide regions encoding or comprising payload molecule of interest, e.g., a transgene, a polynucleotide encoding a polypeptide or multi-polypeptide or a modulatory nucleic acid. Viral vectors of the present invention may be produced recombinantly and may be based on adeno-associated virus (AAV) parent or reference sequence. Such parent or reference AAV sequences may serve as an original, second, third or subsequent sequence for engineering viral vectors. These AAV sequences may serve as either the “donor” sequence of one or more codons (at the nucleic acid level) or amino acids (at the polypeptide level) or “acceptor” sequence of one or more codons (at the nucleic acid level) or amino acids (at the polypeptide level).

[0027] As used herein, a “donor” sequence is any polynucleotide or protein from which the codon or amino acid is selected, respectively.

[0028] In one embodiment, the donor sequence may be derived from any AAV serotype. In one embodiment, the donor sequence may be derived from AAV2. In another embodiment, the donor sequence may be derived from AAV5. In another embodiment, the donor sequence may be derived from AAV7. In another embodiment, the donor sequence may be derived from AAV8. In yet another embodiment, the donor sequence may be derived from AAVrh8. In yet another embodiment, the donor sequence may be derived from AAV9. In another embodiment, the donor sequence may be derived from AAVrh39. In another embodiment, the donor sequence may be derived from AAVrh43. In yet another embodiment, the donor sequence may be derived from AAV10.

[0029] As used herein, an “acceptor” sequence is any polynucleotide or protein into which the codon or amino acid is placed, respectively.

[0030] In one embodiment, the acceptor sequence may be any AAV serotype. In one embodiment, the acceptor sequence may be AAV2. In another embodiment, the acceptor sequence may be AAV5. In another embodiment, the acceptor sequence may be AAV7. In another embodiment, the acceptor sequence may be AAV8. In yet another embodiment, the acceptor sequence may be AAVrh8. In yet another embodiment, the acceptor sequence may be AAV9. In another embodiment, the acceptor sequence may be AAVrh39. In another embodiment, the acceptor sequence may be AAVrh43. In yet another embodiment, the acceptor sequence may be AAV10.

[0031] Viral vectors of the invention may be packaged in a capsid structure or may be capsid free. Non-limiting examples of capsid free viral vector donor and/or acceptor sequences such as AAV0 are described in, for example, US Publication No. 20140107186, the contents of which are incorporated herein by reference in their entirety.

[0032] In one embodiment, the adeno-associated viral (AAV) polynucleotides encoding a chimeric capsid protein described herein may have enhanced transduction, reduced immunogenicity, enhanced crossing the blood-brain barrier, improved expression, and/or increased expression in a baculovirus system as compared to adeno-associated viral (AAV) polynucleotides encoding a non-chimeric capsid protein.

### I. ADENO-ASSOCIATED VIRUSES (AAVS)

### Genome

[0033] The AAV genome is a linear, single-stranded DNA (ssDNA) molecule approximately 5,000 nucleotides (nt) in length. Inverted terminal repeats (ITRs) flank the coding nucleotide sequences for the non-structural proteins (encoded by Rep genes) and the structural proteins (encoded by capsid genes or Cap genes). The AAV genome comprises a characteristic T-shaped hairpin structure defined by the self-complementary terminal 145 nt of the 5′ and 3′ ends of the ssDNA which form an energetically stable double stranded region. The double stranded hairpin structures comprise multiple functions including, but not limited to, acting as an origin for DNA replication by functioning as primers for the endogenous DNA polymerase complex of the host viral replication cell.

[0034] The Rep genes encode the non-structural proteins that regulate functions comprising the replication of the AAV genome. Rep78 and Rep68 are transcribed from the p5 promoter, and Rep52 and Rep40 are transcribed from the p19 promoter. The cap gene encodes the structural proteins, VP1, VP2 and/or VP3 that assemble to form the capsid. The Cap genes are transcribed from the p40 promoter.

[0035] Viral vectors produced by the method of the invention may comprise the genome, in part or entirety, of any naturally occurring and/or recombinant AAV nucleotide sequence or variant. AAV variants may have genomic sequences of significant homology at the nucleic acid and amino acid levels, produce viral vector which are generally physical and functional equivalents, replicate by similar mechanisms, and assemble by similar mechanisms. Chiorini et al., J. Vir. 71: 6823-33 (1997); Srivastava et al., J. Vir. 45:555-64 (1983); Chiorini et al., J. Vir. 73:1309-1319 (1999); Rutledge et al., J. Vir. 72:309-319 (1998); and Wu et al., J. Vir. 74: 8635-47 (2000), the contents of each of which are herein incorporated by reference in its entirety.

[0036] Variant AAV sequences can be used to produce rAAV vectors in insect cells. For example, or more sequences having at least about 70%, at least about 75%, at least about 80%, at least about 85%, at least about 90%, at least about 95%, at least about 99%, or more nucleotide and/or amino acid sequence identity (e.g., a sequence having about 75-99% nucleotide sequence identity) to an AAV1, AAV2, AAV3, and/or AAV4 ITR, Rep, or VP can be used in place of wild-type AAV ITR, Rep, or VP sequences.

[0037] Although similar to other AAV serotypes in many respects, AAV5 differs from other human and simian AAV serotypes more than other known human and simian serotypes. For example, AAV5 Rep and ITR sequences are unable to efficiently cross-complement corresponding Rep and ITR sequences from AAV2 in mammalian cells. See, e.g., Chiorini et al., J. Virol., 73(5):4293-4298 (1999) and Chiorini et al., J. Virol., 73(2):1309-1319 (1999), the contents of each of which are herein incorporated by reference in its entirety. This lack of functional homology in AAV5 Rep and ITR sequences may be due to the relatively significant differences in the nucleotide and amino acid sequences of AAV5 from the corresponding sequences of other AAV serotypes. See, e.g., Bantel-Schaal et al., J. Virol., 73(2):939-947 (1999), the contents of which is herein incorporated by reference in its entirety.

[0038] In view of these differences, the production of AAV5 can differ from production of other serotypes. For example, the use of AAV5 Rep and ITR sequences can be less suitable than sequences from serotypes 1, 2, 3, and 4 in the context of producing pseudotyped AAV vectors. Despite these and other differences between AAV5 and other human and simian serotypes, the inventors have discovered that rAAV5 and rAAV vectors comprising AAV5 capsid proteins can be produced in insect cells in accordance with the present invention. Where methods of the invention are employed to produce rAAV5, it is preferred that one or more vectors comprising, collectively in the case of more than one vector, a nucleotide sequence comprising an AAV5 ITR, a nucleotide sequence comprises an AAV5 Rep52 and/or Rep40 coding sequence, and a nucleotide sequence comprises an AAV5 Rep78 and/or Rep68 coding sequence. Such ITR and Rep sequences can be modified as desired to obtain efficient production of rAAV5 or pseudotyped rAAV5 vectors in insect cells (e.g., the start codon of the Rep sequences can be modified, VP splice sites can be modified or eliminated, and/or the VP1 start codon and nearby nucleotides can be modified to improve the production of rAAV5 in the insect cell).

[0039] In one embodiment, any of the AAV vectors described herein may be produced using a baculovirus production system. As a non-limiting example, the AAV vector may be a chimeric rAAV.

[0040] Modifying AAV Rep and/or VP sequences, whether in AAV5 and other AAV serotypes, to produce modified Rep and/or VP sequences to facilitate AAV and AAV genome production in insect cells (e.g., the production of at least about 1 AAV vector genome/cell) is another important feature of the invention. As a non-limiting example, the sequences can be modified through start codon substitutions, codon context modifications, modifying the nucleotide sequences near the VP1 start codon, and other nucleotide sequence modifications described herein (e.g., the elimination of VP sequence splice sites, false codons, and selection of appropriate promoters).

[0041] In addition to single stranded DNA viral vectors, the present invention also provides for the production of self-complementary AAV vectors (scAAVs). scAAV vectors contain DNA strands which anneal together to form double stranded DNA. By skipping second strand synthesis, scAAVs allow for rapid expression in the cell.

[0042] According to the present invention, any of the AAV sequences listed in Tables 1-6 in whole or in part may serve as a donor or acceptor sequence or as a component of a chimeric viral vector as described herein.

TABLE 1
Adeno-Associated Virus Nucleic Acid Sequences

| | | | Region encoding the |
|---|---|---|---|
| | | Region encoding the non- | capsid protein |
| SEQ | | structural/rep protein | (Accession Number/ |
| ID | Description; Accession | (Accession Number/ | GI Number of |
| NO | Number/GI Number | GI Number of protein) | protein) |
| 1 | Adeno-associated virus - 1; | 335-2206 | 2223-4443 |
| | NC_002077.1/GI: 9632547 | (NP_049541.1/GI: 9632549) | (NP_049542.1/ |
| | | | GI: 9632548) |
| 1 | Adeno-associated virus - 1; | 335-2206 | 2223-4433 |
| | AF063497.1/GI: 4689096 | (AAD27758.1/GI: 4689098) | (AAD27757.1/ |
| | | | GI: 4689097) |
| 2 | Adeno-associated virus - 3; | 318-2192 | 2209-4419 |
| | NC_001729.1/GI: 9628918 | (NP_043940.1/GI: 9628919 | (NP_043941.1; GI: |
| | U48704.1/GI: 1408467 | AAC55048.1 and GI: 1408468) | 9628920 and |
| | | | AAC55049.1/ |
| | | | GI: 1408469) |
| 3 | Adeno-associated virus 3B; | 317-2191 | 2208-4418 |
| | AF028705.1/GI: 2766608 | (AAB95451.1/GI: 2766609 and | (AAB95452.1/GI: |
| | NC_001863.1/GI: 9629897 | AAB95451.1/GI: 2766609) | 2766610 and |
| | | | AAB95452.1/GI: |
| | | | 2766610) |
| 4 | Adeno-associated virus 4; | 372-2243 | 2260-4464 |
| | NC_001829.1/GI: 9629641 | (NP_044926.1/GI: 9629642 and | (NP_044927.1/GI: |
| | U89790.1/GI: 2337938 | AAC58044.1/GI: 2337939) | 9629643 and |
| | | | AAC58045.1/GI: 2337940) |
| 5 | Adeno-associated virus 5; | 359-2191 | 2207-4381 |
| | NC_006152.1/GI: 51593836 | (YP_068408.1/GI: 51593837 | (YP_068409.1/GI: |
| | AF085716.1/GI: 4249656 | and | 51593838 and |
| | | AAD13755.1/GI: 4249657) | AAD13756.1/ |
| | | | GI: 4249658) |
| 6 | Adeno-associated virus 5; | 239-2071 | 2087-4261 |
| | Y18065.1/GI: 4160146 | (CAA77023.1/GI: 4160147) | (CAA77024.1/ |
| | | | GI: 4160148) |
| 7 | Adeno-associated virus - | 347-2179 | 2195-4375 |
| | Go.1; | (ABC69725.1/GI: 85070097) | (ABC69726.1/GI: |
| | DQ335246.2/GI: 108756766 | | 85070098) |
| 8 | Adeno-associated virus 6; | 320-2191 | 2208-4418 |
| | AF028704.1/GI: 2766605 | (AAB95449.1/GI: 2766606 and | (AAB95450.1/GI: |
| | NC_001862.1/GI: 9629894 | NP_045757.1/GI: 9629895) | 2766607 and |
| | | | NP_045758.1/ |
| | | | GI: 9629896) |
| 9 | Adeno-associated virus - 7; | 334-2205 | 2222-4435 |
| | NC_006260.1/GI: 51949960 | (YP_077177.1/GI: 51949961 | (YP_077178.1/GI: |
| | AF513851.1/GI: 22652859 | and | 51949962 |
| | | AAN03854.1/GI: 22652860) | and AAN03855.1/ |
| | | | GI: 22652861) |
| 10 | Adeno-associated virus - 8; | 227-2104 | 2121-4337 |
| | NC_006261.1/GI: 51949963 | (YP_077179.1/GI: 51949964 | (YP_077180.1/GI: |
| | AF513852.1/GI: 22652862 | and AAN03856.1/GI: 22652863) | 51949965 |
| | | | and AAN03857.1/ |
| | | | GI: 22652864) |
| 11 | Adeno-associated virus 9; | | |
| | AX753250.1/GI: 32166107 | | |
| 12 | Adeno-associated virus 10; | 1-1869 | 1886-4102 |
| | AY631965.1/GI: 48728341 | (AY631965.1/GI: 48728341) | (AAT46337.1/GI: |
| | | | 48728343) |
| 13 | Adeno-associated virus 11; | 1-1869 | 1886-4087 |
| | AY631966.1/GI: 48728344 | (AAT46338.1/GI: 48728345) | (AAT46339.1/GI: |
| | | | 48728346) |
| 14 | Adeno-associated virus 12; | 103-1968 | 1985-4213 |
| | DQ813647.1/GI: 112379654 | (ABI16638.1/GI: 112379655) | (ABI16639.1; |
| | | | GI: 112379656) |
| 15 | Adeno-associated virus 13; | 60-1931 | 1948-4149 |
| | EU285562.1/GI: 167047085 | (ABZ10811.1/GI: 167047086) | (ABZ10812.1/GI: |
| | | | 167047087) |

TABLE 2
Adeno-Associated Virus - 2 Nucleic Acid Sequence

| | Description; |
|---|---|
| SEQ ID NO | Accession Number/GI Number |
| 16 | Adeno-associated virus-2; |
| | NC_001401.2/GI: 110645916 |

TABLE 3
Adeno-Associated Virus - 2 Sequence Regions

| | Accession Number/ | SEQ | Corresponding Nucleotide |
|---|---|---|---|
| Description | GI Number | ID NO | Region from Table 2 |
| Adeno-associated virus - | K01624.1/GI: 209623 | 17 | 1-145 |
| 2 ITR | | | |
| Adeno-associated virus - | YP_680422.1/GI: 110645917 | 18 | 321-1906 joined with 228-2252 |
| 2 Rep 68 | AAC03774.1/GI: 2906017 | | |
| Adeno-associated virus - | YP_680423.1/GI: 110645918 | 19 | 321-2186 |
| 2 Rep 78 | AAC03775.1/GI: 2906018 | | |
| Adeno-associated virus - | YP_680424.1; GI: 110645919 | 20 | 993-1906 joined with 2228-2252 |
| 2 Rep 40 | AAC03776.1/GI: 2906019 | | |
| Adeno-associated virus - | YP_680425.1/GI: 110645920 | 21 | 993-2186 |
| 2 Rep 52 | AAC03777.1/GI: 2906020 | | |
| Adeno-associated virus - | YP_680426.1/GI: 110645923 | 22 | 2203-4410 |
| 2 Capsid (VP1) | AAC03780.1/GI: 2906023 | | |
| Adeno-associated virus - | YP_680427.1/GI: 110645921 | 23 | 2614-4410 |
| 2 Capsid (VP2) | AAC03778.1/GI: 2906021 | | |
| Adeno-associated virus - | YP_680428.1/GI: 110645922 | 24 | 2809-4410 |
| 2 Capsid (VP3) | AAC03779.1/GI: 2906022 | | |
| Adeno-associated virus - | YP_004030758.1/GI: | 25 | 2729-3343 |
| 2 Assembly Activating | 312281378 | | |
| Protein (AAP) | ADH10168.1/GI: 296327241 | | |
| Adeno-associated virus - | K01625.1/209624 | 26 | 4535-4679 |
| 2 ITR | | | |

TABLE 4
Adeno-Associated Virus - 2 Nucleic Acid Sequence

| | | Accession Number/ |
|---|---|---|
| SEQ ID NO | Description | GI Number |
| 27 | Adeno-associated virus - 2 | J01901.1/GI: 209616 |

TABLE 5
Adeno-Associated Virus - 2 Sequence Regions

| | | | Corresponding |
|---|---|---|---|
| | Accession | SEQ | Nucleotide |
| | Number/ | ID | Region |
| Description | GI Number | NO | from Table 4 |
| Adeno-associated virus - 2 ITR | — | — | 1-145 |
| Adeno-associated virus - 2 Rep | AAA42372.1/ | 28 | 321-1906 joined |
| 68 | GI: 209617 | | with 228-2252 |
| Adeno-associated virus - 2 Rep | AAA42374.1/ | 29 | 321-2186 |
| 78 | GI: 209619 | | |
| Adeno-associated virus - 2 Rep | AAA42373.1/ | 20 | 993-1906 joined |
| 40 | GI: 209618 | | with 2228-2252 |
| Adeno-associated virus - 2 Rep | AAA42375.1/ | 21 | 993-2186 |
| 52 | GI: 209620 | | |
| Adeno-associated virus - 2 | AAA42376.1/ | 30 | 2810-4324 |
| Capsid | GI: 209621 | | |
| Adeno-associated virus - 2 ITR | — | — | 4535-4679 |

TABLE 6
Adeno-Associated Virus Sequences for Various Species

| | | | | | |
|---|---|---|---|---|---|
| | | | | Region | |
| | | | | encoding the | |
| | | | | non- | Region |
| | | | | structural/rep | encoding the |
| | | | | protein | capsid protein |
| | | | | (Accession | (Accession |
| | Accession | SEQ | | Number/ | Number/ |
| | Number/ | ID | | GI Number of | GI Number of |
| Description | GI Number | NO | ITR | protein) | protein) |

Adeno-associated virus

| | | | | |
|---|---|---|---|---|
| Adeno-associated virus | AY695371.1/ | 31 | 196-2061 | 2078-4285 |
| isolate hu.T32 Rep78 | GI: 51512232 | | (AAU05359.1/ | (AAU05360.1/ |
| protein and capsid | | | GI: 51512233) | GI: 51512234) |
| protein VP1 (cap) | | | | |
| genes, complete cds. | | | | |
| Adeno-associated virus | AY695372.1/ | 32 | 196-2061 | 2078-4285 |
| isolate hu.T40 Rep78 | GI: 51512235 | | (AAU05361.1/ | (AAU05362.1/ |
| protein and capsid | | | GI: 51512236) | GI: 51512237) |
| protein VP1 (cap) | | | | |
| genes, complete cds. | | | | |
| Adeno-associated virus | AY695373.1/ | 33 | 196-2061 | 2078-4285 |
| isolate hu.T70 Rep78 | GI: 51512238 | | (AAU05363.1/ | (AAU05364.1/ |
| protein and capsid | | | GI: 51512239) | GI: 51512240) |
| protein VP1 (cap) | | | | |
| genes, complete cds. | | | | |
| Adeno-associated virus | AY695374.1/ | 34 | 196-2061 | 2078-4285 |
| isolate hu.T71 Rep78 | GI: 51512241 | | (AAU05365.1/ | (AAU05366.1/ |
| protein and capsid | | | GI: 51512242) | GI: 51512243) |
| protein VP1 (cap) | | | | |
| genes, complete cds. | | | | |
| Adeno-associated virus | AY695375.1/ | 35 | 196-2061 | 2078-4285 |
| isolate hu.T88 Rep78 | GI: 51512244 | | (AAU05367.1/ | (AAU05368.1/ |
| protein and capsid | | | GI: 51512245) | GI: 51512246) |
| protein VP1 (cap) | | | | |
| genes, complete cds. | | | | |
| Adeno-associated virus | AY695376.1/ | 36 | 196-2061 | 2078-4285 |
| isolate hu.S17 Rep78 | GI: 51512247 | | (AAU05369.1/ | (AAU05370.1/ |
| protein and capsid | | | GI: 51512248) | GI: 51512249) |
| protein VP1 (cap) | | | | |
| genes, complete cds. | | | | |

Adeno-associated virus - Po1

| | | | | |
|---|---|---|---|---|
| Adeno-associated virus- | FJ688147.1/ | 37 | 1-764 | 780-2930 |
| Po1 Rep gene, partial | GI: | | (ACN42943.1/ | (ACN42940.1/ |
| cds; and VP1, VP2, and | 224384438 | | GI: 224384442) | GI: 224384439) |
| VP3 genes, complete | | | | 1188-2930 |
| cds. | | | | (ACN42941.1/ |
| | | | | GI: 224384440) |
| | | | | 1329-2930 |
| | | | | (ACN42942.1/ |
| | | | | GI: 224384441) |

Adeno-associated virus VR-195

| | | | | |
|---|---|---|---|---|
| Adeno-associated virus | DQ180604.1/ | 38 | 103-1974 | 1991-4201 |
| VR-195 Rep78 (rep78) | GI: 77380105 | | (ABA71698.1/ | (ABA71699.1/ |
| and capsid protein (cap) | | | GI: 77380106) | GI: 77380107) |
| genes, complete cds. | | | | |

Adeno-associated virus VR-355

| | | | | |
|---|---|---|---|---|
| Adeno-associated virus | DQ180605.1/ | 39 | 102-1973 | 1990-4200 |
| VR-355 Rep78 (rep78) | GI: 77380108 | | (ABA71700.1/ | (ABA71701.1/ |
| and capsid protein (cap) | | | GI: 77380109) | GI: 77380110) |
| genes, complete cds. | | | | |

Avian adeno-associated virus

| | | | | | |
|---|---|---|---|---|---|
| Avian adeno-associated | GQ368252.1/ | 40 | | 243-2237 | 2255-4471 |
| virus isolate YZ-1, | GI: | | | (ACU30841.1/ | (ACU30842.1/ |
| complete genome | 255710032 | | | GI: 255710033) | GI: 255710034) |
| Avian adeno-associated | KF937794.1/ | 41 | 1-142 | 244-2235 | 2253-4469 |
| virus isolate ZN1, | GI: | | 4540-4682 | (AHK22792.1/ | (AHK22793.1/ |
| complete genome | 588284633 | | | GI: 588284634) | GI: 588284635) |

Avian adeno-associated virus ATCC VR-865

| | | | | | |
|---|---|---|---|---|---|
| Avian adeno-associated | AY186198.1/ | 42 | 1-142 | 244-2232 | 2250-4481 |
| virus ATCC VR-865, | GI: 31414777 | | 4552-4694 | (AAO32086.1/ | (AAO32087.1/ |
| complete genome | | | | GI: 31414778) | GI: 31414779) |
| Avian adeno-associated | NC_004828.1/ | 42 | 1-142 | 244-2232 | 2250-4481 |
| virus ATCC VR-865, | GI: 31543992 | | 4552-4694 | (NP_852780.1/ | (NP_852781.1/ |
| complete genome | | | | GI: 31543993) | GI: 31543994) |
| Avian adeno-associated | AY629582.1/ | 42 | 1-142 | 244-2232 | 2250-4481 |
| virus ATCC VR-865, | GI: 48996102 | | 4552-4694 | (AAT48612.1/ | (AAT48613.1/ |
| complete genome | | | | GI: 48996103) | GI: 48996104) |

Avian adeno-associated virus strain DA-1

| | | | | | |
|---|---|---|---|---|---|
| Avian adeno-associated | AY629583.1/ | 43 | 1-142 | 244-2235 | 2253-4469 |
| virus strain DA-1, | GI: 48996105 | | 4540-4682 | (AAT48614.1/ | (AAT48615.1/ |
| complete genome | | | | GI: 48996106) | GI: 48996107) |
| Avian adeno-associated | NC_006263.1/ | 43 | 1-142 | 244-2235 | 2253-4469 |
| virus strain DA-1, | GI: | | 4540-4682 | (YP_077182.1/ | (YP_077183.1/ |
| complete genome | 51949968 | | | GI: 51949969) | GI: 51949970) |

Bat adeno-associated virus YNM

| | | | | |
|---|---|---|---|---|
| Bat adeno-associated | GU226971.1/ | 44 | 200-2041 | 2059-4233 |
| virus YNM, complete | GI: 289719008 | | (ADD17085.1/ | (ADD17086.1/ |
| sequence | | | GI: 289719009) | GI: 289719010) |
| Bat adeno-associated | NC_014468.1/ | 44 | 200-2041 | 2059-4233 |
| virus YNM, complete | GI: 304422916 | | (YP_003858571.1/ | (YP_003858572.1/ |
| genome | | | GI: | GI: |
| | | | 304422917) | 304422918) |

Bovine adeno-associated virus

| | | | | |
|---|---|---|---|---|
| Bovine adeno- | AY388617.1/ | 45 | 368-2200 | 2216-4426 |
| associated virus, | GI: 38679253 | | (AAR26464.1/ | (AAR26465.1/ |
| complete genome | | | GI: 38679254) | GI: 38679255) |
| Bovine adeno- | NC_005889.1/ | 45 | 368-2200 | 2216-4426 |
| associated virus, | GI: 48696557 | | (YP_024970.1/ | (YP_024971.1/ |
| complete genome | | | GI: 48696558) | GI: 48696559) |

Bovine parvovirus - 2

| | | | | |
|---|---|---|---|---|
| Bovine parvovirus 2 | AF406966.1/ | 46 | 306-1919 | 2268-5384 |
| putative non-structural | GI: 15825370 | | (AAL09671.1/ | (AAL09672.1/ |
| protein and putative | | | GI: 15825371) | GI: 15825372) |
| capsid protein genes, | | | | |
| complete cds. | | | | |
| Bovine parvovirus 2, | NC_006259.1/ | 46 | 306-1919 | 2268-5384 |
| complete genome | GI: 51949957 | | (YP_077175.1/ | (YP_077176.1/ |
| | | | GI: 51949958) | GI: 51949959) |

California sea lion adeno-associated virus 1

| | | | | |
|---|---|---|---|---|
| California sea lion | JN420371.1/ | 47 | 284-2086 | 2117-4273 |
| adeno-associated virus | GI: 34345896 | | (AEM37641.1/ | (AEM37642.1/ |
| 1 isolate 1136 Rep78 | | | GI: 343458967) | GI: 343458968) |
| and VP1 genes, | | | | |
| complete cds. | | | | |
| California sea lion | JN420372.1/ | 48 | 291-2093 | 2124-4280 |
| adeno-associated virus | GI: 343458969 | | (AEM37643.1/ | (AEM37644.1/ |
| 1 isolate 1187 Rep78 | | | GI: 343458970) | GI: 343458971) |
| and VP1 genes, | | | | |
| complete cds. | | | | |

Goose parvovirus

| | | | | | |
|---|---|---|---|---|---|
| Goose parvovirus | (U25749.1/GI: | 49 | 1-444 | 537-2420 | 2439-4637 |
| virulent B strain, | 1113795) | | 4663-5106 | (AAA83229.1/ | (AAA83230.1/ |
| complete genome | | | | GI: 1113796) | GI: 1113797) |
| | | | | | 2874-4637 |
| | | | | | (AAA83231.1/ |
| | | | | | GI: 1113798) |
| | | | | | 3033-4637 |
| | | | | | (AAA83232.1/ |
| | | | | | GI: 1113799) |
| Goose parvovirus, | (NC_001701.1/ | 49 | 1-444 | 537-2420 | 2439-4637 |
| complete genome | GI: 9628649) | | 4663-5106 | (NP_043514.1/ | (NP_043515.1/ |
| | | | | GI: 9628650) | GI: 9628651) |
| | | | | | 2874-4637 |
| | | | | | (NP_043516.1/ |
| | | | | | GI: 9628652) |
| | | | | | 3033-4637 |
| | | | | | (NP_043517.1/ |
| | | | | | GI: 9628653) |
| Goose parvovirus strain | (EU583389.1/ | 50 | 1-381 | 474-2357 | 2376-4574 |
| 82-0321V, complete | GI: 190888188) | | 4600-4980 | (ACE95848.1/ | (ACE95849.1/ |
| genome | | | | GI: 190888189) | GI: 190888190) |
| Goose parvovirus strain | (EU583390.1/ | 51 | 1-416 | 509-2392 | 2411-4609 |
| 82-0321, complete | GI: 190888191) | | 4635-5050 | (ACE95850.1/ | (ACE95851.1/ |
| genome | | | | GI: 190888192) | GI: 190888193) |
| Goose parvovirus strain | (EU583391.1/ | 52 | 1-418 | 511-2394 | 2413-4611 |
| 06-0329, complete | GI: 190888194) | | 4637-5054 | (ACE95852.1/ | ACE95853.1/ |
| genome | | | | GI: 190888195) | GI: 190888196) |
| Goose parvovirus strain | (EU583392.1/ | 53 | 1-443 | 536-2419 | 2438-4636 |
| VG32/1, complete | GI: 190888197) | | 4662-5104 | (ACE95854.1/ | (ACE95855.1/ |
| genome | | | | GI: 190888198) | GI: 190888199) |
| Goose parvovirus strain | (JF333590.1/ | 54 | 1-444 | 537-2420 | 2439-4637 |
| SH, complete genome | GI: 343113618) | | 4663-5106 | (AEL87777.1/ | (AEL87778.1/ |
| | | | | GI: 343113619) | GI: 343113620) |
| | | | | | 2874-4637 |
| | | | | | (AEL87779.1/ |
| | | | | | GI: 343113621) |
| | | | | | 3033-4637 |
| | | | | | (AEL87780.1/ |
| | | | | | GI: 343113622) |
| Goose parvovirus strain | (HQ891825.1/ | 55 | 1-444 | 537-2420 | 2439-4637 |
| GDaGPV, complete | GI: 359843307) | | 4663-5106 | (AEV89789.1/ | (AEV89790.1/ |
| genome | | | | GI: 359843308) | GI: 359843309) |
| | | | | | 2874-4637 |
| | | | | | (AEV89791.1/ |
| | | | | | GI: 359843310) |
| | | | | | 3033-4637 |
| | | | | | (AEV89792.1/ |
| | | | | | GI: 359843311) |
| Goose parvovirus strain | (KC478066.1/ | 56 | 1-416 | 509-2392 | 2411-4609 |
| SHFX1201, complete | GI: 459360514) | | | (AGG56527.1/ | (AGG56528.1/ |
| genome | | | | GI: 459360515) | GI: 459360516) |
| Goose parvovirus strain | (KC178571.1/ | 57 | 1-444 | 537-2420 | 2439-4637 |
| Y, complete genome | GI: 513129761) | | | (AGO17637.1/ | (AGO17638.1/ |
| | | | | GI: 513129762) | GI: 513129763) |
| Goose parvovirus strain | (KC184133.1/ | 58 | 1-443 | 536-2419 | 2438-4636 |
| E, complete genome | GI: 513129764) | | | (AGO17639.1/ | (AGO17640.1/ |
| | | | | GI: 513129765) | GI: 513129766) |
| Goose parvovirus strain | (KC996729.1/ | 59 | 1-442 | 535-2418 | 2437-4635 |
| SYG61v, complete | GI: 531997217) | | | (AGT62580.1/ | (AGT62581.1/ |
| genome | | | | GI: 531997218) | GI: 531997219) |
| Goose parvovirus strain | (KC996730.1/ | 60 | 1-414 | 507-2390 | 2409-4607 |
| YZ99-6, complete | GI: 531997220) | | | (AGT62582.1/ | (AGT62583.1/ |
| genome | | | | GI: 531997221) | GI: 531997222) |
| Goose parvovirus | (AF416726.1/ | 61 | | 1-1884 | 1903-4101 |
| nonstructural protein | GI: 17226299) | | | (AAL37721.1/ | (AAL37722.1/ |
| NS (ns) and capsid | | | | GI: 17226300) | GI: 17226301) |
| protein VP (vp) genes, | | | | 529-1884 | |
| complete cds. | | | | (ABP93843.1/ | |
| | | | | GI: 145694447) | |
| Goose parvovirus strain | (EF515837.1/ | 62 | | 1-1884 | 1903-4101 |
| DY NS1 (NS1), NS2 | GI: 145694445) | | | (ABP93842.1/ | (ABP82770.1/ |
| (NS2), VP1 (VP1), | | | | GI: 145694446) | GI: 145573169) |
| VP2 (VP2), and VP3 | | | | | 2338-4101 |
| (VP3) genes, complete | | | | | (ABP93844.1/GI: |
| cds. | | | | | 145694448) |
| | | | | | 2497-4101 |
| | | | | | (ABP93845.1/ |
| | | | | | GI: 145694449) |
| Goose parvovirus strain | (JF926695.1/ | 63 | | 9-1892 | 1911-4109 |
| PT NS1 protein and | GI: 354463162) | | | (AER25356.1/ | (AER25357.1/ |
| VP1 protein genes, | | | | GI: 354463163) | GI: 354463164) |
| complete cds. | | | | | |
| Goose parvovirus strain | (JF926696.1/ | 64 | | 6-1889 | 1908-4106 |
| D NS1 protein and VP1 | GI: 354463165) | | | (AER25358.1/ | (AER25359.1/ |
| protein genes, complete | | | | GI: 354463166) | GI: 354463167) |
| cds. | | | | | |

Mouse adeno-associated virus 1

| | | | | |
|---|---|---|---|---|
| Mouse adeno- | DQ100362.1/ | 65 | 1-327 | 344-2485 |
| associated virus 1 rep | GI: 73665994 | | (AAZ79671.1/ | (AAZ79672.1/ |
| gene, partial cds; and | | | GI: 73665995) | GI: 73665996) |
| VP1 capsid, VP2 | | | | 731-2485 |
| capsid, and VP3 capsid | | | | (AAZ79673.1/ |
| genes, complete cds. | | | | GI: 73665997) |
| | | | | 911-2485 |
| | | | | (AAZ79674.1/ |
| | | | | GI: 73665998) |

Muscovy duck parvovirus

| | | | | | |
|---|---|---|---|---|---|
| Barbarie duck | U22967.1/GI: | 66 | 1-457 | 548-2431 | 2450-4648 |
| parvovirus REP protein | 1113784 | | 4678-5132 | (AAA83224.1/ | (AAA83225.1/ |
| (rep) and three capsid | | | | GI: 1113785) | GI: 1113786) |
| protein VP (vp) genes, | | | | | 2885-4648 |
| complete cds | | | | | (AAA83226.1/ |
| | | | | | GI: 1113787) |
| | | | | | 3044-4648 |
| | | | | | (AAA83227.1/ |
| | | | | | GI: 1113788) |
| Muscovy duck | NC_006147.2/ | 66 | 1-457 | 548-2431 | 2450-4648 |
| parvovirus, complete | GI: 51593841 | | 4678-5132 | (YP_068410.1/ | (YP_068411.1/ |
| genome | | | | GI: 51593842) | GI: 51593843) |
| | | | | | 2885-4648 |
| | | | | | (YP_068412.1; |
| | | | | | GI: 51593844) |
| | | | | | 3044-4648 |
| | | | | | (YP_068413.1/ |
| | | | | | GI: 51593845) |
| Muscovy duck | JF926697.1/ | 67 | | 61-1944 | 1963-4161 |
| parvovirus strain P REP | GI: 354463168 | | | (AER25360.1/ | (AER25361.1/ |
| protein and VP1 protein | | | | GI: 354463169) | GI: 354463170) |
| genes, complete cds. | | | | | |
| Muscovy duck | JF926698.1/ | 68 | | 61-1944 | 1963-4161 |
| parvovirus strain P1 | GI: 354463171 | | | (AER25362.1/ | (AER25363.1/ |
| REP protein and VP1 | | | | GI: 354463172) | GI: 354463173) |
| protein genes, complete | | | | | |
| cds. | | | | | |
| Muscovy duck | KC171936.1/ | 69 | 1-381 | 512-2395 | 2414-4612 |
| parvovirus isolate | GI: 459256867 | | 4681-5061 | (AGG53766.1/ | (AGG53768.1/ |
| SAAS-SHNH, | | | | GI: 459256868) | GI: 459256870) |
| complete genome | | | | | 2849-4612 |
| | | | | | (AGG53769.1/ |
| | | | | | GI: 459256871) |
| | | | | | 3008-4612 |
| | | | | | (AGG53767.1/ |
| | | | | | GI: 459256869) |

Serpentine adeno-associated virus 2

| | | | | |
|---|---|---|---|---|
| Serpentine adeno- | EU872429.1/ | 70 | 1-642 | 661-1297 |
| associated virus 2 non- | GI: 215401981 | | (ACJ66590.1/ | (ACJ66591.1/ |
| structural protein 1 and | | | GI: 215401982) | GI: 215401983) |
| capsid protein genes, | | | | |
| partial cds | | | | |

Snake parvovirus 1

| | | | | |
|---|---|---|---|---|
| Snake parvovirus 1 | AY349010.1/ | 71 | 324-2012 | 2030-4210 |
| non-structural protein 1 | GI: 38017148 | | (AAR07954.1/ | (AAR07955.1/ |
| (NS1) and capsid | | | GI: 38017149) | GI: 38017150) |
| protein (VP1) genes, | | | | |
| complete cds | | | | |
| Snake parvovirus 1, | NC_006148.1/ | 71 | 324-2012 | 2030-4210 |
| complete genome | GI: 51555744 | | (YP_068093.1/ | (YP_068094.1/ |
| | | | GI: 51555745) | GI: 51555746) |

[0043] In one embodiment, the adeno-associated virus sequence may be any of the sequences related to AAV2 described in European Patent Application No. EP1164195, the contents of which are herein incorporated by reference in its entirety, such as, but not limited to, SEQ ID NOs: 1-12 of European Patent Application No. EP1164195.

[0044] In one embodiment, the adeno-associated virus sequence may be any of the sequences described in European Patent Application No. EP1279740, the contents of which are herein incorporated by reference in its entirety, such as, but not limited to, SEQ ID NOs: 1-5 of European Patent Application No. EP1279740.

[0045] In one embodiment, the adeno-associated virus sequence may be isolated or detected by the methods described in European Patent No. EP1310571, the contents of which are herein incorporated by reference in its entirety. As a non-limiting example, the adeno-associated virus sequence may be any of the sequences described in European Patent No. EP1310571 such as, but not limited to, SEQ ID NOs: 1, 4-59 and 115-120.

[0046] In one embodiment, the adeno-associated virus sequence may be any of the AAV vector related sequences described in U.S. Pat. No. 7,169,612, the contents of which are herein incorporated by reference in its entirety, such as, but not limited to, SEQ ID NO: 5 of U.S. Pat. No. 7,169,612.

[0047] In one embodiment, the adeno-associated virus sequence may be any of the sequences related to AAV1 described in European Patent Application No. EP1845163, the contents of which are herein incorporated by reference in its entirety, such as, but not limited to, SEQ ID NOs: 1, 4, 6, 8, 10, 12, 14, 16, and 18-20 of European Patent Application No. EP1845163.

[0048] In one embodiment, the adeno-associated virus sequence may be any of the sequences described in European Patent Application No. EP1847614, the contents of which are herein incorporated by reference in its entirety, such as, but not limited to, SEQ ID NOs: 1-12 of European Patent Application No. EP1847614.

[0049] In one embodiment, the adeno-associated virus sequence may be any of the AAV vector related sequences described in European Patent Application No. EP1849872, the contents of which are herein incorporated by reference in its entirety, such as, but not limited to, SEQ ID NOs: 1-4, 6, and 7 of European Patent Application No. EP1849872.

[0050] In one embodiment, the adeno-associated virus sequence may be any of the sequences described in European Patent Application No. EP2292779, the contents of which are herein incorporated by reference in its entirety, such as, but not limited to, SEQ ID NOs: 1-82, 165-180, 182 and 199-215 of European Patent Application No. EP2292779.

[0051] In one embodiment, the adeno-associated virus sequence may be any of the sequences described in European Patent Application No. EP2292780, the contents of which are herein incorporated by reference in its entirety, such as, but not limited to, SEQ ID NOs: 1-82, 165-180, 182 and 199-215 of European Patent Application No. EP2292780.

[0052] In one embodiment, the adeno-associated virus sequence may be any of the sequences described in European Patent Application No. EP2298926, the contents of which are herein incorporated by reference in its entirety, such as, but not limited to, SEQ ID NOs: 1-82, 165-180, 182 and 199-215 of European Patent Application No. EP2298926.

[0053] In one embodiment, the adeno-associated virus sequence may be any of the sequences described in European Patent Application No. EP2345731, the contents of which are herein incorporated by reference in its entirety, such as, but not limited to, SEQ ID NOs: 1-82, 165-180, 182 and 199-215 of European Patent Application No. EP2345731.

[0054] In one embodiment, the adeno-associated virus sequence may be any of the AAV vector related sequences described in European Patent Application No. EP2311966, the contents of which are herein incorporated by reference in its entirety, such as, but not limited to, SEQ ID NO: 7 of European Patent Application No. EP2311966.

[0055] In one embodiment, the adeno-associated virus sequence may be any of the AAV vector related sequences described in European Patent Application No. EP2311967, the contents of which are herein incorporated by reference in its entirety, such as, but not limited to, SEQ ID NO: 7 of European Patent Application No. EP2311967.

[0056] In one embodiment, the adeno-associated virus sequence may be any of the AAV vector related sequences described in European Patent Application No. EP2357010, the contents of which are herein incorporated by reference in its entirety, such as, but not limited to, SEQ ID NOs: 7 and 11-19 of European Patent Application No. EP2357010.

[0057] In one embodiment, the adeno-associated virus sequence may be any of the AAV vector related sequences described in European Patent Application No. EP2359865, the contents of which are herein incorporated by reference in its entirety, such as, but not limited to, SEQ ID NOs: 7 and 11-19 of European Patent Application No. EP2359865.

[0058] In one embodiment, the adeno-associated virus sequence may be any of the AAV vector related sequences described in European Patent Application No. EP2359866, the contents of which are herein incorporated by reference in its entirety, such as, but not limited to, SEQ ID NOs: 7 and 11-19 of European Patent Application No. EP2359866.

[0059] In one embodiment, the adeno-associated virus sequence may be any of the AAV vector related sequences described in European Patent Application No. EP2359867, the contents of which are herein incorporated by reference in its entirety, such as, but not limited to, SEQ ID NOs: 7 and 11-19 of European Patent Application No. EP2359867.

[0060] In one embodiment, the adeno-associated virus sequence may be any of the AAV vector related sequences described in European Patent Application No. EP2383346, the contents of which are herein incorporated by reference in its entirety, such as, but not limited to, SEQ ID NOs: 7 and 11-19 of European Patent Application No. EP2383346.

[0061] In one embodiment, the adeno-associated virus sequence may be any of the sequences related to AAV8 described in European Patent Application No. EP2359869, the contents of which are herein incorporated by reference in its entirety, such as, but not limited to, SEQ ID NO: 8 of European Patent Application No. EP2359869.

[0062] In one embodiment, the adeno-associated virus sequence may be any of the sequences related to AAV8 described in U.S. Pat. No. 7,282,199, the contents of which are herein incorporated by reference in its entirety, such as, but not limited to, SEQ ID NO: 1 of U.S. Pat. No. 7,282,199.

[0063] In one embodiment, the adeno-associated virus sequence may be any of the sequences related to AAV8 described in U.S. Pat. No. 7,790,449, the contents of which are herein incorporated by reference in its entirety, such as, but not limited to, SEQ ID NO: 1 of U.S. Pat. No. 7,790,449.

[0064] In one embodiment, the adeno-associated virus sequence may be any of the sequences related to AAV8 described in U.S. Pat. No. 8,318,480, the contents of which are herein incorporated by reference in its entirety, such as, but not limited to, SEQ ID NO: 1 of U.S. Pat. No. 8,318,480.

[0065] In one embodiment, the adeno-associated virus sequence may be any of the AAV vector related sequences or capsid free AAV vectors described in European Patent Application No. EP2500434, the contents of which are herein incorporated by reference in its entirety, such as, but not limited to, SEQ ID NOs: 1-6 of European Patent Application No. EP2500434.

[0066] In one embodiment, the adeno-associated virus sequence may be any of the sequences described in European Patent Application No. EP2660325, the contents of which are herein incorporated by reference in its entirety, such as, but not limited to, SEQ ID NOs: 1-158 of European Patent Application No. EP2660325.

[0067] In one embodiment, the adeno-associated virus sequence may be any of the AAV vector related sequences described in U.S. Pat. No. 5,474,935, the contents of which are herein incorporated by reference in its entirety, such as, but not limited to, SEQ ID NOs: 1-4 of U.S. Pat. No. 5,474,935.

[0068] In one embodiment, the adeno-associated virus sequence may be any of the AAV vector related sequences described in U.S. Pat. No. 5,587,308, the contents of which are herein incorporated by reference in its entirety, such as, but not limited to, SEQ ID NOs: 1-12 of U.S. Pat. No. 5,587,308.

[0069] In one embodiment, the adeno-associated virus sequence may be any of the AAV vector related sequences described in U.S. Pat. No. 5,658,785, the contents of which are herein incorporated by reference in its entirety, such as, but not limited to, SEQ ID NOs: 1-3 of U.S. Pat. No. 5,658,785.

[0070] In one embodiment, the adeno-associated virus sequence may be any of the AAV vector related sequences described in U.S. Pat. No. 5,693,531, the contents of which are herein incorporated by reference in its entirety, such as, but not limited to, SEQ ID NO: 1 of U.S. Pat. No. 5,693,531.

[0071] In one embodiment, the adeno-associated virus sequence may be any of the AAV vector related sequences described in U.S. Pat. No. 5,858,775, the contents of which are herein incorporated by reference in its entirety, such as, but not limited to, SEQ ID NOs: 1-3 of U.S. Pat. No. 5,858,775.

[0072] In one embodiment, the adeno-associated virus sequence may be any of the AAV vector related sequences described in U.S. Pat. No. 5,866,696, the contents of which are herein incorporated by reference in its entirety, such as, but not limited to, SEQ ID NOs: 1-13 of U.S. Pat. No. 5,866,696.

[0073] In one embodiment, the adeno-associated virus sequence may be any of the AAV vector related sequences described in U.S. Pat. No. 5,952,221, the contents of which are herein incorporated by reference in its entirety, such as, but not limited to, SEQ ID NOs: 1-11 of U.S. Pat. No. 5,952,221.

[0074] In one embodiment, the adeno-associated virus sequence may be any of the AAV vector related sequences described in U.S. Pat. No. 5,962,313, the contents of which are herein incorporated by reference in its entirety, such as, but not limited to, SEQ ID NOs: 1-8 of U.S. Pat. No. 5,962,313.

[0075] In one embodiment, the adeno-associated virus sequence may be any of the AAV vector related sequences described in U.S. Pat. No. 5,989,540, the contents of which are herein incorporated by reference in its entirety, such as, but not limited to, SEQ ID NOs: 1-13 of U.S. Pat. No. 5,989,540.

[0076] In one embodiment, the adeno-associated virus sequence may be any of the AAV vector related sequences described in U.S. Pat. No. 6,200,560, the contents of which are herein incorporated by reference in its entirety, such as, but not limited to, SEQ ID NOs: 1-14 of U.S. Pat. No. 6,200,560.

[0077] In one embodiment, the adeno-associated virus sequence may be any of the adenovirus related sequences described in U.S. Pat. No. 6,270,996, the contents of which are herein incorporated by reference in its entirety, such as, but not limited to, SEQ ID NOs: 1 and 3-5 of U.S. Pat. No. 6,270,996.

[0078] In one embodiment, the adeno-associated virus sequence may be any of the AAV vector related sequences described in U.S. Pat. No. 6,416,992, the contents of which are herein incorporated by reference in its entirety, such as, but not limited to, SEQ ID NOs: 2-6 of U.S. Pat. No. 6,416,992.

[0079] In one embodiment, the adeno-associated virus sequence may be any of the AAV vector related sequences described in U.S. Pat. No. 6,436,392, the contents of which are herein incorporated by reference in its entirety, such as, but not limited to, SEQ ID NOs: 1-13 of U.S. Pat. No. 6,436,392.

[0080] In one embodiment, the adeno-associated virus sequence may be any of the AAV vector related sequences or adenovirus chimeric recombinant viruses described in U.S. Pat. No. 6,468,771, the contents of which are herein incorporated by reference in its entirety, such as, but not limited to, SEQ ID NOs: 1-12 of U.S. Pat. No. 6,468,771.

[0081] In one embodiment, the adeno-associated virus sequence may be any of the AAV vector related sequences described in U.S. Pat. No. 6,509,150, the contents of which are herein incorporated by reference in its entirety, such as, but not limited to, SEQ ID NOs: 1-9 of U.S. Pat. No. 6,509,150.

[0082] In one embodiment, the adeno-associated virus sequence may be any of the AAV vector related sequences described in U.S. Pat. No. 6,521,426, the contents of which are herein incorporated by reference in its entirety, such as, but not limited to, SEQ ID NOs: 1-4 of U.S. Pat. No. 6,521,426.

[0083] In one embodiment, the adeno-associated virus sequence may be any of the AAV vector related sequences described in U.S. Pat. No. 6,582,692, the contents of which are herein incorporated by reference in its entirety, such as, but not limited to, SEQ ID NOs: 1, 3, 5, 7 and 9-16 of U.S. Pat. No. 6,582,692.

[0084] In one embodiment, the adeno-associated virus sequence may be any of the AAV vector related sequences described in U.S. Pat. No. 6,642,051, the contents of which are herein incorporated by reference in its entirety, such as, but not limited to, SEQ ID NOs: 1-5 of U.S. Pat. No. 6,642,051.

[0085] In one embodiment, the adeno-associated virus sequence may be any of the AAV vector related sequences described in U.S. Pat. No. 6,670,176, the contents of which are herein incorporated by reference in its entirety, such as, but not limited to, SEQ ID NOs: 1-20 of U.S. Pat. No. 6,670,176.

[0086] In one embodiment, the adeno-associated virus sequence may be any of the AAV vector related sequences described in U.S. Pat. No. 6,710,036, the contents of which are herein incorporated by reference in its entirety, such as, but not limited to, SEQ ID NOs: 1-6 of U.S. Pat. No. 6,710,036.

[0087] In one embodiment, the adeno-associated virus sequence may be any of the AAV vector related sequences described in U.S. Pat. No. 6,723,551, the contents of which are herein incorporated by reference in its entirety, such as, but not limited to, SEQ ID NOs: 1-3, 5-24 of U.S. Pat. No. 6,723,551.

[0088] In one embodiment, the adeno-associated virus sequence may be any of the AAV vector related sequences described in U.S. Pat. No. 6,846,665, the contents of which are herein incorporated by reference in its entirety, such as, but not limited to, SEQ ID NOs: 1 and 2 of U.S. Pat. No. 6,846,665.

[0089] In one embodiment, the adeno-associated virus sequence may be any of the AAV vector related sequences described in U.S. Pat. No. 6,897,045, the contents of which are herein incorporated by reference in its entirety, such as, but not limited to, SEQ ID NOs: 1-14 of U.S. Pat. No. 6,897,045.

[0090] In one embodiment, the adeno-associated virus sequence may be any of the AAV vector related sequences described in U.S. Pat. No. 7,070,998, the contents of which are herein incorporated by reference in its entirety, such as, but not limited to, SEQ ID NOs: 1-3 of U.S. Pat. No. 7,070,998.

[0091] In one embodiment, the adeno-associated virus sequence may be any of the sequences related to AAV1 described in U.S. Pat. No. 7,105,345, the contents of which are herein incorporated by reference in its entirety, such as, but not limited to, SEQ ID NOs: 1, 4, 6, 8, 10, 12, 14, 16 and 18-20 of U.S. Pat. No. 7,105,345.

[0092] In one embodiment, the adeno-associated virus sequence may be any of the AAV vector related sequences described in U.S. Pat. No. 7,125,705, the contents of which are herein incorporated by reference in its entirety, such as, but not limited to, SEQ ID NOs: 1-28 of U.S. Pat. No. 7,125,705.

[0093] In one embodiment, the adeno-associated virus sequence may be any of the sequences related to AAV1 described in U.S. Pat. No. 7,186,552, the contents of which are herein incorporated by reference in its entirety, such as, but not limited to, SEQ ID NOs: 1, 4, 6, 8, 10, 12, 14, 16 and 18-20 of U.S. Pat. No. 7,186,552.

[0094] In one embodiment, the adeno-associated virus sequence may be any of the sequences related to AAV9 described in U.S. Pat. No. 7,198,951, the contents of which are herein incorporated by reference in its entirety, such as, but not limited to, SEQ ID NO: 1 of U.S. Pat. No. 7,198,951.

[0095] In one embodiment, the adeno-associated virus sequence may be any of the AAV vector related sequences described in U.S. Pat. No. 7,241,447, the contents of which are herein incorporated by reference in its entirety, such as, but not limited to, SEQ ID NOs: 1-13 of U.S. Pat. No. 7,241,447.

[0096] In one embodiment, the adeno-associated virus sequence may be any of the AAV vector related sequences described in U.S. Pat. No. 7,271,002, the contents of which are herein incorporated by reference in its entirety, such as, but not limited to, SEQ ID NOs: 1-3, 5-24 and 33-35 of U.S. Pat. No. 7,271,002.

[0097] In one embodiment, the adeno-associated virus sequence may be any of the AAV vector related sequences described in U.S. Pat. No. 7,510,872, the contents of which are herein incorporated by reference in its entirety, such as, but not limited to, SEQ ID NOs: 1-3 of U.S. Pat. No. 7,510,872.

[0098] In one embodiment, the adeno-associated virus sequence may be any of the pseudotyped AAV vector related sequences described in U.S. Pat. No. 7,638,120, the contents of which are herein incorporated by reference in its entirety, such as, but not limited to, SEQ ID NOs: 1-15 of U.S. Pat. No. 7,638,120.

[0099] In one embodiment, the adeno-associated virus sequence may be any of the AAV vector related sequences described in U.S. Pat. No. 7,662,627, the contents of which are herein incorporated by reference in its entirety, such as, but not limited to, SEQ ID NOs: 1-3 of U.S. Pat. No. 7,662,627.

[0100] In one embodiment, the adeno-associated virus sequence may be any of the AAV vector related sequences described in U.S. Pat. No. 7,803,622, the contents of which are herein incorporated by reference in its entirety, such as, but not limited to, SEQ ID NOs: 1-14 of U.S. Pat. No. 7,803,622.

[0101] In one embodiment, the adeno-associated virus sequence may be any of the AAV vector related sequences described in U.S. Pat. No. 7,906,111, the contents of which are herein incorporated by reference in its entirety, such as, but not limited to, SEQ ID NOs: 1-82, 165-180, 182, and 199-215 of U.S. Pat. No. 7,906,111.

[0102] In one embodiment, the adeno-associated virus sequence may be any of the AAV vector related sequences described in U.S. Pat. No. 8,241,622, the contents of which are herein incorporated by reference in its entirety, such as, but not limited to, SEQ ID NOs: 1-11 of U.S. Pat. No. 8,241,622.

[0103] In one embodiment, the adeno-associated virus sequence may be any of the AAV vector related sequences described in U.S. Pat. No. 8,273,344, the contents of which are herein incorporated by reference in its entirety, such as, but not limited to, SEQ ID NOs: 1-5 of U.S. Pat. No. 8,273,344.

[0104] In one embodiment, the adeno-associated virus sequence may be any of the AAV vector related sequences described in U.S. Pat. No. 8,283,151, the contents of which are herein incorporated by reference in its entirety, such as, but not limited to, SEQ ID NOs: 1-20, 31-34 and 39-53 of U.S. Pat. No. 8,283,151.

[0105] In one embodiment, the adeno-associated virus sequence may be any of the AAV vector related sequences described in U.S. Pat. No. 8,318,687, the contents of which are herein incorporated by reference in its entirety, such as, but not limited to, SEQ ID NOs: 1, 3, 5, 7, 9 and 11-19 of U.S. Pat. No. 8,318,687.

[0106] In one embodiment, the adeno-associated virus sequence may be any of the AAV vector related sequences described in U.S. Pat. No. 8,409,842, the contents of which are herein incorporated by reference in its entirety, such as, but not limited to, SEQ ID NOs: 1-3 of U.S. Pat. No. 8,409,842.

[0107] In one embodiment, the adeno-associated virus sequence may be any of the AAV vector related sequences described in U.S. Pat. No. 8,524,446, the contents of which are herein incorporated by reference in its entirety, such as, but not limited to, SEQ ID NOs: 1, 4-59 and 116-120 of U.S. Pat. No. 8,524,446.

[0108] In one embodiment, the adeno-associated virus sequence may be any of the AAV vector related sequences described in International Patent Publication No. WO2004111250, the contents of which are herein incorporated by reference in its entirety, such as, but not limited to, SEQ ID NOs: 1-14 of International Patent Publication No. WO2004111250.

[0109] In one embodiment, the adeno-associated virus sequence may be any of the AAV vector related sequences described in International Patent Publication No. WO2000066780, the contents of which are herein incorporated by reference in its entirety, such as, but not limited to, SEQ ID NOs: 1-98 of International Patent Publication No. WO2000066780.

[0110] In one embodiment, the adeno-associated virus sequence may be any of the AAV vector related sequences described in International Patent Publication No. WO2001025465, the contents of which are herein incorporated by reference in its entirety, such as, but not limited to, SEQ ID NOs: 1-98 of International Patent Publication No. WO2001025465.

[0111] In one embodiment, the adeno-associated virus sequence may be any of the sequences related to AAV REP78 described in International Patent Publication No. WO2001032711, the contents of which are herein incorporated by reference in its entirety, such as, but not limited to, SEQ ID NO: 5 of International Patent Publication No. WO2001032711.

[0112] In one embodiment, the adeno-associated virus sequence may be any of the sequences related to AAV REP78 described in International Patent Publication No. WO2007130519, the contents of which are herein incorporated by reference in its entirety, such as, but not limited to, SEQ ID NO: 29-88 and 233-241 of International Patent Publication No. WO2007130519.

[0113] In one embodiment, the adeno-associated virus sequence may be any of the sequences related to AAV REP78 described in International Patent Publication No. WO2007148971, the contents of which are herein incorporated by reference in its entirety, such as, but not limited to, SEQ ID NO: 7 and 10 of International Patent Publication No. WO2007148971.

[0114] In one embodiment, the adeno-associated virus sequence may be any of the AAV vector related sequences described in International Patent Publication No. WO2001036603, the contents of which are herein incorporated by reference in its entirety, such as, but not limited to, SEQ ID NOs: 1, 3, 5, 7, and 9-16 of International Patent Publication No. WO2001036603.

[0115] In one embodiment, the adeno-associated virus sequence may be any of the ecdysone-inducible AAV vector related sequences described in International Patent Publication No. WO2001036623, the contents of which are herein incorporated by reference in its entirety, such as, but not limited to, SEQ ID NOs: 1-8 of International Patent Publication No. WO2001036623.

[0116] In one embodiment, the adeno-associated virus sequence may be any of the chimeric capsid vector related sequences described in International Patent Publication No. WO2001068888, the contents of which are herein incorporated by reference in its entirety, such as, but not limited to, SEQ ID NOs: 1, 3-6 of International Patent Publication No. WO2001068888.

[0117] In one embodiment, the adeno-associated virus sequence may be any of the AAV vector related sequences described in International Patent Publication No. WO2002012525, the contents of which are herein incorporated by reference in its entirety, such as, but not limited to, SEQ ID NOs: 1-3, 5 and 6 of International Patent Publication No. WO2002012525.

[0118] In one embodiment, the adeno-associated virus sequence may be any of the AAV vector related sequences described in International Patent Publication No. WO2002020748, the contents of which are herein incorporated by reference in its entirety, such as, but not limited to, SEQ ID NOs: 4-6 of International Patent Publication No. WO2002020748.

[0119] In one embodiment, the adeno-associated virus sequence may be any of the AAV vector related sequences described in International Patent Publication No. WO2003010320, the contents of which are herein incorporated by reference in its entirety, such as, but not limited to, SEQ ID NOs: 1-5 of International Patent Publication No. WO2003010320.

[0120] In one embodiment, the adeno-associated virus sequence may be any of the AAV vector related sequences described in International Patent Publication No. WO2003087382, the contents of which are herein incorporated by reference in its entirety, such as, but not limited to, SEQ ID NO: 1 of International Patent Publication No. WO2003087382.

[0121] In one embodiment, the adeno-associated virus sequence may be any of the AAV vector related sequences described in International Patent Publication No. WO2003087383, the contents of which are herein incorporated by reference in its entirety, such as, but not limited to, SEQ ID NOs: 1-12 of International Patent Publication No. WO2003087383.

[0122] In one embodiment, the adeno-associated virus sequence may be any of the AAV vector related sequences described in International Patent Publication No. WO1999053084, the contents of which are herein incorporated by reference in its entirety, such as, but not limited to, SEQ ID NOs: 1-4 of International Patent Publication No. WO1999053084.

[0123] In one embodiment, the adeno-associated virus sequence may be any of the AAV vector related sequences described in International Patent Publication No. WO2004075861, the contents of which are herein incorporated by reference in its entirety, such as, but not limited to, SEQ ID NOs: 1-3 of International Patent Publication No. WO2004075861.

[0124] In one embodiment, the adeno-associated virus sequence may be any of the AAV vector related sequences described in International Patent Publication No. WO2004083441, the contents of which are herein incorporated by reference in its entirety, such as, but not limited to, SEQ ID NOs: 1, 4, 6, 8, 10, 12, 14, 16, 18-20 and 54-56 of International Patent Publication No. WO2004083441.

[0125] In one embodiment, the adeno-associated virus sequence may be any of the AAV vector related sequences such as the AAV7 or AAV8 related sequences described in International Patent Publication No. WO2004108922, the contents of which are herein incorporated by reference in its entirety, such as, but not limited to, SEQ ID NOs: 7 and 8 of International Patent Publication No. WO2004108922.

[0126] In one embodiment, the adeno-associated virus sequence may be any of the AAV vector related sequences described in International Patent Publication No. WO2004111248, the contents of which are herein incorporated by reference in its entirety, such as, but not limited to, SEQ ID NOs: 1-6 of International Patent Publication No. WO2004111248.

[0127] In one embodiment, the adeno-associated virus sequence may be any of the AAV vector related sequences described in International Patent Publication No. WO2005012537, the contents of which are herein incorporated by reference in its entirety, such as, but not limited to, SEQ ID NO: 11 of International Patent Publication No. WO2005012537.

[0128] In one embodiment, the adeno-associated virus sequence may be any of the AAV vector related sequences described in International Patent Publication No. WO2005033321, the contents of which are herein incorporated by reference in its entirety, such as, but not limited to, SEQ ID NOs: 1-82, 165-180, 182 and 199-215 of International Patent Publication No. WO2005033321.

[0129] In one embodiment, the adeno-associated virus sequence may be any of the AAV vector related sequences described in International Patent Publication No. WO2005111220, the contents of which are herein incorporated by reference in its entirety, such as, but not limited to, SEQ ID NOs: 1-11 of International Patent Publication No. WO2005111220.

[0130] In one embodiment, the adeno-associated virus sequence may be any of the AAV vector related sequences described in International Patent Publication No. WO2006110689, the contents of which are herein incorporated by reference in its entirety, such as, but not limited to, SEQ ID NOs: 7 and 11-19 of International Patent Publication No. WO2006110689.

[0131] In one embodiment, the adeno-associated virus sequence may be any of the AAV vector related sequences described in International Patent Publication No. WO2007046703, the contents of which are herein incorporated by reference in its entirety, such as, but not limited to, SEQ ID NO: 7 of International Patent Publication No. WO2007046703.

[0132] In one embodiment, the adeno-associated virus sequence may be any of the vector related sequences described in International Patent Publication No. WO2009014445, the contents of which are herein incorporated by reference in its entirety, such as, but not limited to, SEQ ID NOs: 1-5, 7, 9 and 10 of International Patent Publication No. WO2009014445.

[0133] In one embodiment, the adeno-associated virus sequence may be any of the AAV vector related sequences described in International Patent Publication No. WO2009038462, the contents of which are herein incorporated by reference in its entirety, such as, but not limited to, SEQ ID NOs: 1 and 2 of International Patent Publication No. WO2009038462.

[0134] In one embodiment, the adeno-associated virus sequence may be any of the optimized rep or capsid related sequences described in International Patent Publication No. WO2009104964, the contents of which are herein incorporated by reference in its entirety, such as, but not limited to, SEQ ID NOs: 1-5, 7, 9, 20, 22, 24 and 31 of International Patent Publication No. WO2009104964.

[0135] In one embodiment, the adeno-associated virus sequence may be any of the AAV vector related sequences described in International Patent Publication No. WO2011054976, the contents of which are herein incorporated by reference in its entirety, such as, but not limited to, SEQ ID NOs: 15 and 16 of International Patent Publication No. WO2011054976.

[0136] In one embodiment, the adeno-associated virus sequence may be any of the AAV vector related sequences described in International Patent Publication No. WO2011122950, the contents of which are herein incorporated by reference in its entirety, such as, but not limited to, SEQ ID NO: 10 of International Patent Publication No. WO2011122950.

[0137] In one embodiment, the adeno-associated virus sequence may be any of the AAV vector related sequences described in International Patent Publication No. WO2012057363, the contents of which are herein incorporated by reference in its entirety, such as, but not limited to, SEQ ID NOs: 1-22 of International Patent Publication No. WO2012057363.

[0138] In one embodiment, the adeno-associated virus sequence may be any of the AAV vector related sequences described in International Patent Publication No. WO2012114090, the contents of which are herein incorporated by reference in its entirety, such as, but not limited to, SEQ ID NOs: 1, 8 and 9 of International Patent Publication No. WO2012114090.

[0139] In one embodiment, the adeno-associated virus sequence may be any of the capsid free AAV vector related sequences described in International Patent Publication No. WO2012123430, the contents of which are herein incorporated by reference in its entirety, such as, but not limited to, SEQ ID NOs: 1-6 of International Patent Publication No. WO2012123430.

[0140] In one embodiment, the adeno-associated virus sequence may be any of the AAV vector related sequences described in International Patent Publication No. WO2012158757, the contents of which are herein incorporated by reference in its entirety, such as, but not limited to, SEQ ID NOs: 1-6 of International Patent Publication No. WO2012158757.

[0141] In one embodiment, the adeno-associated virus sequence may be any of the AAV vector related sequences described in International Patent Publication No. WO2013164793, the contents of which are herein incorporated by reference in its entirety, such as, but not limited to, SEQ ID NOs: 9, 17, 18 and 20 of International Patent Publication No. WO2013164793.

[0142] In one embodiment, the adeno-associated virus sequence may be any of the AAV vector related sequences described in International Patent Publication No. WO1995011997, the contents of which are herein incorporated by reference in its entirety, such as, but not limited to, SEQ ID NOs: 1-9 of International Patent Publication No. WO1995011997.

[0143] In one embodiment, the adeno-associated virus sequence may be any of the AAV vector related sequences described in International Patent Publication No. WO1999027110, the contents of which are herein incorporated by reference in its entirety, such as, but not limited to, SEQ ID NOs: 1-11 of International Patent Publication No. WO1999027110.

[0144] In one embodiment, the adeno-associated virus sequence may be any of the AAV vector related sequences or adenovirus chimeric recombinant viruses described in International Patent Publication No. WO1999032647, the contents of which are herein incorporated by reference in its entirety, such as, but not limited to, SEQ ID NOs: 1-12 of International Patent Publication No. WO1999032647.

[0145] In one embodiment, the adeno-associated virus sequence may be any of the sequences described in Japanese patent application numbers JP 2001169777 (see e.g., SEQ ID NO: 1-7), JP 2001500497 (see e.g., SEQ ID NO: 1-4), JP 2001520051 (see e.g., SEQ ID NO: 1-5), JP 2001526900 (see e.g., SEQ ID NO: 1-12), JP 2002153278 (see e.g., SEQ ID NO: 5, 6), JP 2002515257 (see e.g., SEQ ID NO: 1-7), JP 2002516345 (see e.g., SEQ ID NO: 1-6), JP 2002529098 (see e.g., SEQ ID NO: 1-11), JP 2002542805 (see e.g., SEQ ID NO: 1-98), JP 2003174896 (see e.g., SEQ ID NO: 1), JP 2003235562 (see e.g., SEQ ID NO: 1-63), JP 2003501006 (see e.g., SEQ ID NO: 1, 2), JP 2003507063 (see e.g., SEQ ID NO: 1, 11), JP 2003507063 (see e.g., SEQ ID NO: 2-10, 12, 13), JP 2003526377 (see e.g., SEQ ID NO: 1-5), JP 2003531166 (see e.g., SEQ ID NO: 1-5), JP 2003533170 (see e.g., SEQ ID NO: 1-13), JP 2004506658 (see e.g., SEQ ID NO: 1), JP 2004508041 (see e.g., SEQ ID NO: 1-6), JP 2004532822 (see e.g., SEQ ID NO: 1-11), JP 2005021149 (see e.g., SEQ ID NO: 1-14), JP 2005512533 (see e.g., SEQ ID NO: 1), JP 2005516949 (see e.g., SEQ ID NO: 1-3), JP 2005522517 (see e.g., SEQ ID NO: 1-12), JP 2005522994 (see e.g., SEQ ID NO: 1), JP 2005525086 (see e.g., SEQ ID NO: 1-63), JP 2006518187 (see e.g., SEQ ID NO: 3), JP 2007082565 (see e.g., SEQ ID NO: 1-3), JP 2007507223 (see e.g., SEQ ID NO: 1-116), JP 2007524386 (see e.g., SEQ ID NO: 11, 12, 15), JP 2007527219 (see e.g., SEQ ID NO: 1-22), JP 2008506363 (see e.g., SEQ ID NO: 1-11), JP 2009195237 (see e.g., SEQ ID NO: 1-6, 7-57, 60-63), JP 2009512436 (see e.g., SEQ ID NO: 7), JP 2010273690 (see e.g., SEQ ID NO: 11, 12, 15), JP 2010534472 (see e.g., SEQ ID NO: 1-8), JP 2010538675 (see e.g., SEQ ID NO: 1, 2), JP 2011101646 (see e.g., SEQ ID NO: 1, 3, 98-104, 112, 114, 115), JP 2011101646 (see e.g., SEQ ID NO: 2, 4-97, 105-113, 116), JP 2011254821 (see e.g., SEQ ID NO: 1), JP 2012165744 (see e.g., SEQ ID NO: 1, 3-16), JP 2012175974 (see e.g., SEQ ID NO: 1-116), JP 2012503980 (see e.g., SEQ ID NO: 7, 8), JP 2012519008 (see e.g., SEQ ID NO: 1-19, 23-34, 59-61, 82-87, 100, 101), JP 2012521750 (see e.g., SEQ ID NO: 3, 4), JP 2012525150 (see e.g., SEQ ID NO: 1-34), JP 2013509890 (see e.g., SEQ ID NO: 1, 2), JP 2013529063 (see e.g., SEQ ID NO: 14) and JP 2014012013 (see e.g., SEQ ID NO: 7, 10), and Korean patent application numbers KR 1019997001915 (see e.g., SEQ ID NO: 1-4), KR 1020027004803 (see e.g., SEQ ID NO: 1), KR 1020030092680 (see e.g., SEQ ID NO: 1-13), KR 1020040054043 (see e.g., SEQ ID NO: 1-5), KR 1020047007245 (see e.g., SEQ ID NO: 1, 4-53, 55-59, 115-120), KR 1020050067661 (see e.g., SEQ ID NO: 1-15), KR 1020050067662 (see e.g., SEQ ID NO: 1-11), KR 1020057008410 (see e.g., SEQ ID NO: 5), KR 1020057023896 (see e.g., SEQ ID NO: 1, 3, 5, 7, 9, 11-19), KR 1020100094020 (see e.g., SEQ ID NO: 9-33), KR 1020110086553 (see e.g., SEQ ID NO: 11, 12) and KR 1020120089743 (see e.g., SEQ ID NO: 15, 16), the contents of each of which are herein incorporated by reference in their entirety.

### Inverted Terminal Repeats (ITRs)

[0146] AAV ITR nucleotide sequence comprise a palindromic sequence, comprising complementary, symmetrically arranged sequences referred to as “A,” “B,” and “C” regions. The ITR functions as an origin of replication comprising recognition sites for replication proteins Rep78 or Rep68. The “D” region of the ITR is an asymmetrical region of the ITR that comprises the DNA nick site at the junction between the A and D regions where DNA replication initiates and provides directionality to the nucleic acid replication step. An AAV replicating in a mammalian cell typically comprises two ITR sequences.

[0147] A single ITR may be engineered with Rep binding sites on both strands of the A regions and two symmetrical D regions on each side of the ITR palindrome. Such an engineered construct on a double-stranded circular DNA template allows Rep78 or Rep68 initiated nucleic acid replication that proceeds in both directions. A single ITR is sufficient for AAV replication of a circular vector.

[0148] According to the present invention, the payload construct vector may comprise an even number of two or more ITR sequences. In some embodiments, the payload construct vector comprises one ITR sequence. In some embodiments, the payload construct vector comprises two ITR sequences.

[0149] Methods of producing viral vectors described herein may comprise methods to prevent further propagation after initial introduction into a target cell. Safety of viral vectors may also be improved by using a viral expression construct comprising nucleotide sequences encoding a chimeric ITR. In this instance, a payload construct vector comprising a chimeric ITR may only be replicated by the Rep or Rep protein equivalent which is capable of binding the chimeric ITR. A chimeric ITR may comprise a binding site for a Rep protein or Rep protein equivalent and a nicking site. In one embodiment, a chimeric ITR of the viral expression construct comprises a binding site which is specific for the insect Rep protein, NS-1.

[0150] In one embodiment of the invention, the payload construct vector comprises at least one chimeric ITR nucleotide sequence comprising an AAV backbone and a specific binding and nicking site of a Rep protein from a parvovirus other than AAV, a nucleotide sequence encoding a parvoviral Rep protein that can specifically bind and nick the site in the ITR nucleotide sequence within the viral expression construct.

[0151] In one embodiment, the chimeric ITR is the AAV2/JcDNV ITR sequence and the nucleotide sequence encoding Rep coding sequence is that of NS-1.

[0152] In one embodiment, the adeno-associated virus sequence may be any of the ITR sequences described in European Patent Application No. EP2524037, the contents of which are herein incorporated by reference in its entirety, such as, but not limited to, SEQ ID NOs: 1-12 of European Patent Application No. EP2524037.

### Rep Genes

[0153] AAV Rep sequences are highly conserved among many AAV variants. Rep78 proteins of the variants AAV2, AAV3A, AAV3B, AAV4, and AAV6 are approximately 89-93% identical (Bantel-Schaal et al., (1999) J. Virol., 73(2):939-947, the contents of which are herein incorporated by reference in its entirety). The Rep gene sequences of many AAV variants are known to functionally substitute corresponding sequences from other variants in production of AAV particles in mammalian cells. In one embodiment, a Rep protein equivalent derived from a parvovirus other than AAV is the non-structural protein NS-1 from Junonia coenia densovirus (JcDNV) as described in U.S. Pat. No. 7,271,002, the contents of which are herein incorporated by reference in its entirety. The NS-1 protein has been shown to have binding/nicking and ATP-dependent helicase activities closely matching those of AAV Rep78 and Rep68 (Ding et al., J. Virol., 76(1):338-345 2002, the contents of which is herein incorporated by reference in its entirety). In one embodiment, a binding site for NS-1 comprising four repeats of a GAC sequence may be engineered into the viral expression construct of the invention.

[0154] Rep78 and Rep68 function in two distinct roles as part of a replication mechanism known as ‘rolling hairpin replication’ that is characteristic of Rep proteins from parvoviruses. Rep78 and Rep68 comprise both exonuclease activity and DNA helicase activity. Either Rep78 and/or Rep68 bind to unique and known sites on the sequence of the ITR hairpin. These binding sites comprise short and repeated nucleotide sequences located on the A region of the ITR hairpin, and nick the DNA backbone at the beginning of the D region. In a second mode of activity, Rep78 or Rep68 exerts an ATP-dependent helicase activity for unwinding double-stranded DNA. Consequently, Rep78 and Rep68 act to break and unwind the hairpin structures on the end of the parvoviral genome, thereby providing access to replication machinery of the viral replication cell.

[0155] According to the present invention, Rep proteins may be expressed from more than one ORF comprising nucleotide sequence encoding any combination of Rep78, Rep68, Rep 52 and/or Rep40 by use of separate nucleotide sequences operably linked to at least one expression control sequence for expression in a viral replication cell, each producing one or more of Rep78, Rep68, Rep 52 and/or Rep40 Rep proteins.

[0156] In one embodiment, Rep proteins may be expressed individually from an ORF comprising nucleotide sequence encoding any one of Rep78, Rep68, Rep 52, or Rep40 by use of separate nucleotide sequences operably linked to one expression control sequence for expression in a viral replication cell, each producing only one Rep78, Rep68, Rep 52, or Rep40 Rep protein.

[0157] In another embodiment, Rep proteins may be expressed from one ORF comprising nucleotide sequences encoding Rep78 and Rep52 Rep proteins operably linked to at least one expression control sequence for expression in a viral replication cell each producing Rep78 and Rep52 Rep protein.

[0158] In other embodiments, Parvovirus Rep proteins or the equivalents thereof, which specifically bind ITRs, nick single-stranded DNA, and display ATP-dependent helicase activity may be employed. In one embodiment, chimeric ITRs using binding sites and nick sequences for other parvoviruses may be constructed for viral expression constructs having an AAV backbone.

[0159] Nucleic acid sequences encoding one or more AAV Rep proteins useful in the present invention are disclosed in Table 7. Such sequences may be further engineered in any manner taught herein.

TABLE 7
Adeno-Associated Virus Rep Protein Encoding Sequences

| | | | Region encoding |
|---|---|---|---|
| | | SEQ | the Rep protein |
| | Accession Number/ | ID | (Accession Number/ |
| Description | GI Number | NO | GI Number of protein) |
| Duck parvovirus clone 04Nb REP | (DQ250134.1/ | 72 | 1-1884 |
| gene, complete cds. | GI:82468918) | | (ABB76814.1/GI:82468919) |
| Goose parvovirus strain HG5/82 | (AY506546.1/ | 73 | 1-1884 |
| NS protein (ns) gene, complete | GI:40795863) | | (AAR91602.1/GI:40795864) |
| cds. | | | |
| Goose parvovirus strain HBZF07 | (EU022755.1/ | 74 | 1-1884 |
| NS1 (NS1) gene, complete cds. | GI:154201542) | | (ABS71119.1/GI:154201543) |
| Goose parvovirus strain LN-1/06 | (EU253479.1/ | 75 | 1-1884 |
| non-structural protein (NS) gene, | GI:160415348) | | (ABX38993.1/GI:160415349) |
| complete cds. | | | |
| Peromyscus adeno-associated | (JF755424.1/ | 76 | 1-220 |
| virus M-6/USA/2010 | GI:343196983) | | (AEM05828.1/GI:343196984) |
| nonstructural protein gene, partial | | | |
| cds | | | |
| Peromyscus adeno-associated | (JF755425.1/ | 77 | 1-422 |
| virus M-6/USA/2010 | GI:343196985) | | (AEM05829.1/GI:343196986) |
| nonstructural protein gene, partial | | | |
| cds | | | |
| Peromyscus adeno-associated | (JF755426.1/ | 78 | 1-280 |
| virus M-6/USA/2010 | GI:343196987) | | (AEM05830.1/GI:343196988) |
| nonstructural protein gene, partial | | | |
| cds | | | |
| Goose parvovirus strain H1 non- | (JQ409356.1/ | 79 | 1-1884 |
| structural protein 1 (NS1) gene, | GI:385215215) | | (AFI49447.1/GI:385215216) |
| complete cds. | | | |

[0160] In one embodiment, the adeno-associated virus sequence may be any of the Rep sequences described in U.S. Pat. No. 6,753,419, the contents of which are herein incorporated by reference in its entirety, such as, but not limited to, SEQ ID NOs: 1-11 of U.S. Pat. No. 6,753,419.

### Capsid Genes

[0161] The naturally occurring AAV Cap gene expresses VP1, VP2, and VP3 proteins encoded by a single open reading frame of the Cap gene under control of the p40 promoter. In the production system of the invention, one or more ORFs may comprise nucleotide sequences encoding one or more capsid proteins. These proteins may be encoded on the viral expression construct. In one embodiment, VP proteins may be expressed from more than one ORF comprising nucleotide sequence encoding any combination of VP1, VP2, and/or VP3 by use of separate nucleotide sequences operably linked to at least one expression control sequence for expression in a viral replication cell, each producing one or more of VP1, VP2, and/or VP3 capsid proteins. In one embodiment, VP proteins may be expressed individually from an ORF comprising nucleotide sequence encoding any one of VP1, VP2, or VP3 by use of separate nucleotide sequences operably linked to one expression control sequence for expression in a viral replication cell, each producing only one of VP1, VP2, or VP3 capsid protein. In another embodiment, VP proteins may be expressed from one ORF comprising nucleotide sequences encoding VP1, VP2, and VP3 capsid proteins operably linked to at least one expression control sequence for expression in a viral replication cell, each producing VP1, VP2, and VP3 capsid protein.

[0162] The Cap gene sequence, and the protein sequences that comprise the VP proteins VP1, VP2, VP3 that the Cap gene encodes, are less conserved than other AAV viral components, including the Rep gene and proteins. VP proteins comprise the capsid of the viral vector, the outermost surface of the viral vector, and therefore are the primary determinant of cellular tropism of the viral vector. The highly conserved sequences of the Rep and ITR genes allow for cross-complementation of Rep and ITR sequences with the Cap sequences of other AAV variants. As a non-limiting example, the Rep and ITR sequences of one or more AAV variants may be combined with the Cap sequences from any AAV variant. In one embodiment, a viral vector may be produced, according to the invention, encoding the Rep sequences of AAV2 and the Cap sequences of AAV4. The viral vector may further comprises proteins expressed from a payload construct vector encoding the ITR sequences from AAV2.

[0163] The overall decreased conservation of the Cap nucleotide sequence, as compared to the Rep and ITR nucleotide sequences, described between AAV variants is often confined to discrete variable regions (VR). Variable regions in the Cap nucleotide sequence may encode discrete regions of the mature folded capsid proteins of the viral vector particle. Variation of the viral vector at regions that contact cellular proteins may regulate the virus-cell interactions that define the tropism of a single AAV variant. In some embodiments, AAV variants are defined by VR of the Cap genes, VP1, VP2, and/or VP3.

[0164] As used herein, tropism refers to a property of AAV wherein AAV variants may preferentially transduce a subset of organisms, tissues, or cell types.

[0165] The protein subunit structure of capsid proteins is comprised of secondary structures such as helices and beta sheets. A group of beta-sheets may further comprise a tertiary structure known in the art as a beta barrel. In a non-limiting example, an AAV2 capsid subunit may comprise a beta barrel further comprised of beta sheets A, B, C, D, E, F, G, H, and I (Xi et al. PNAS 2002 Aug. 6; 99(16):10405-10, the contents of which are herein incorporated by reference in their entirety). Beta sheet subunits may be connected by loop structures that extend away from the main beta sheet barrel and are commonly named by the adjacent beta sheets. In a non-limiting example, an AAV2 beta barrel may comprise beta sheets H and I which are connected by an HI loop. In some embodiments, AAV variants are defined by VR of structural elements, including but not limited to the HI loop.

[0166] Nucleic acid sequences encoding one or more AAV capsid proteins useful in the present invention are disclosed in Table 8. Such sequences may be further engineered in any manner taught herein.

TABLE 8
Adeno-Associated Virus Capsid Sequences

| | | SEQ | Region encoding the capsid |
|---|---|---|---|
| | Accession Number/ | ID | protein (Accession Number/ |
| Description | GI Number | NO | GI Number of protein) |
| Adeno-associated virus 9 | AY530579.1/ | 80 | 1-2211 |
| isolate hu.14 capsid protein | GI:46487804 | | (AAS99264.1/GI:46487805) |
| VP1 (cap) gene, complete cds | | | |
| Adeno-associated virus isolate | AY530553.1/ | 81 | 1-2196 |
| pi.1 capsid protein VP1 (cap) | GI:46487752 | | (AAS99238.1/GI:46487753) |
| gene, complete cds | | | |
| Adeno-associated virus isolate | AY530554.1/ | 82 | 1-2196 |
| pi.2 capsid protein VP1 (cap) | GI:46487754 | | (AAS99239.1/GI:46487755) |
| gene, complete cds | | | |
| Adeno-associated virus isolate | AY530555.1/ | 83 | 1-2196 |
| pi.3 capsid protein VP1 (cap) | GI:46487756 | | (AAS99240.1/GI:46487757) |
| gene, complete cds | | | |
| Adeno-associated virus isolate | AY530556.1/ | 84 | 1-2214 |
| rh.1 capsid protein VP1 (cap) | GI:46487758 | | (AAS99241.1/GI:46487759) |
| gene, complete cds | | | |
| Adeno-associated virus isolate | AY530557.1/ | 85 | 1-2217 |
| rh.25 capsid protein VP1 (cap) | GI:46487760 | | (AAS99242./GI:46487761) |
| gene, complete cds | | | |
| Adeno-associated virus isolate | AY530558.1/ | 86 | 1-2217 |
| rh.38 capsid protein VP1 (cap) | GI:46487762 | | (AAS99243.1/GI:46487763) |
| gene, complete cds | | | |
| Adeno-associated virus isolate | AY530559.1/ | 87 | 1-2217 |
| rh.40 capsid protein VP1 (cap) | GI:46487764 | | (AAS99244.1/GI:46487765) |
| gene, complete cds | | | |
| Adeno-associated virus isolate | AY530560.1/ | 88 | 1-2211 |
| rh.43 capsid protein VP1 (cap) | GI:46487766 | | (AAS99245.1/GI:46487767) |
| gene, complete cds | | | |
| Adeno-associated virus isolate | AY530561.1/ | 89 | 1-2214 |
| rh.48 capsid protein VP1 (cap) | GI:46487768 | | (AAS99246.1/GI:46487769) |
| gene, complete cds | | | |
| Adeno-associated virus isolate | AY530562.1/ | 90 | 1-2217 |
| rh.49 capsid protein VP1 (cap) | GI:46487770 | | (AAS99247.1/GI:46487771) |
| gene, complete cds | | | |
| Adeno-associated virus isolate | AY530563.1/ | 91 | 1-2217 |
| rh.50 capsid protein VP1 (cap) | GI:46487772 | | (AAS99248.1/GI:46487773) |
| gene, complete cds | | | |
| Adeno-associated virus isolate | AY530564.1/ | 92 | 1-2217 |
| rh.51 capsid protein VP1 (cap) | GI:46487774 | | (AAS99249.1/GI:46487775) |
| gene, complete cds | | | |
| Adeno-associated virus isolate | AY530565.1/ | 93 | 1-2217 |
| rh.52 capsid protein VP1 (cap) | GI:46487776 | | (AAS99250.1/GI:46487777) |
| gene, complete cds | | | |
| Adeno-associated virus isolate | AY530566.1/ | 94 | 1-2217 |
| rh.53 capsid protein VP1 (cap) | GI:46487778 | | (AAS99251.1/GI:46487779) |
| gene, complete cds | | | |
| Adeno-associated virus isolate | AY530567.1/ | 95 | 1-2214 |
| rh.54 capsid protein VP1 (cap) | GI:46487780 | | (AAS99252.1/GI:46487781) |
| gene, complete cds | | | |
| Adeno-associated virus isolate | AY530568.1/ | 96 | 1-2214 |
| rh.55 capsid protein VP1 (cap) | GI:46487782 | | (AAS99253.1/GI:46487783) |
| gene, complete cds | | | |
| Adeno-associated virus isolate | AY530569.1/ | 97 | 1-2217 |
| rh.57 capsid protein VP1 (cap) | GI:46487784 | | (AAS99254.1/GI:46487785) |
| gene, complete cds | | | |
| Adeno-associated virus isolate | AY530570.1/ | 98 | 1-2217 |
| rh.58 capsid protein VP1 (cap) | GI:46487786 | | (AAS99255.1/GI:46487787) |
| gene, complete cds | | | |
| Adeno-associated virus isolate | AY530571.1/ | 99 | 1-2208 |
| rh.60 capsid protein VP1 (cap) | GI:46487788 | | (AAS99256.1/GI:46487789) |
| gene, complete cds | | | |
| Adeno-associated virus isolate | AY530572.1/ | 100 | 1-2217 |
| rh.61 capsid protein VP1 (cap) | GI:46487790 | | (AAS99257.1/GI:46487791) |
| gene, complete cds | | | |
| Adeno-associated virus isolate | AY530573.1/ | 101 | 1-2214 |
| rh.62 capsid protein VP1 (cap) | GI:46487792 | | (AAS99258.1/GI:46487793) |
| gene, complete cds | | | |
| Adeno-associated virus isolate | AY530574.1/ | 102 | 1-2217 |
| rh.64 capsid protein VP1 (cap) | GI:46487794 | | (AAS99259.1/GI:46487795) |
| gene, complete cds | | | |
| Adeno-associated virus isolate | AY530575.1/ | 103 | 1-2208 |
| hu.1 capsid protein VP1 (cap) | GI:46487796 | | (AAS99260.1/GI:46487797) |
| gene, complete cds | | | |
| Adeno-associated virus isolate | AY530576.1/ | 104 | 1-2208 |
| hu.10 capsid protein VP1 | GI:46487798 | | (AAS99261.1/GI:46487799) |
| (cap) gene, complete cds | | | |
| Adeno-associated virus isolate | AY530577.1/ | 105 | 1-2208 |
| hu.11 capsid protein VP1 | GI:46487800 | | (AAS99262.1/GI:46487801) |
| (cap) gene, complete cds | | | |
| Adeno-associated virus isolate | AY530578.1/ | 106 | 1-2208 |
| hu.13 capsid protein VP1 | GI:46487802 | | (AAS99263.1/GI:46487803) |
| (cap) gene, complete cds | | | |
| Adeno-associated virus isolate | AY530580.1/ | 107 | 1-2208 |
| hu.15 capsid protein VP1 | GI:46487806 | | (AAS99265.1/GI:46487807) |
| (cap) gene, complete cds | | | |
| Adeno-associated virus isolate | AY530581.1/ | 108 | 1-2208 |
| hu.16 capsid protein VP1 | GI:46487808 | | (AAS99266.1/GI:46487809) |
| (cap) gene, complete cds | | | |
| Adeno-associated virus isolate | AY530582.1/ | 109 | 1-2217 |
| hu.17 capsid protein VP1 | GI:46487810 | | (AAS99267.1/GI:46487811) |
| (cap) gene, complete cds | | | |
| Adeno-associated virus isolate | AY530583.1/ | 110 | 1-2208 |
| hu.18 capsid protein VP1 | GI:46487812 | | (AAS99268.1/GI:46487813) |
| (cap) gene, complete cds | | | |
| Adeno-associated virus isolate | AY530584.1/ | 111 | 1-2208 |
| hu.19 capsid protein VP1 | GI:46487814 | | (AAS99269.1/GI:46487815) |
| (cap) gene, complete cds | | | |
| Adeno-associated virus isolate | AY530585.1/ | 112 | 1-2208 |
| hu.2 capsid protein VP1 (cap) | GI:46487816 | | (AAS99270.1/GI:46487817) |
| gene, complete cds | | | |
| Adeno-associated virus isolate | AY530586.1/ | 113 | 1-2208 |
| hu.20 capsid protein VP1 | GI:46487818 | | (AAS99271.1/GI:46487819) |
| (cap) gene, complete cds | | | |
| Adeno-associated virus isolate | AY530587.1/ | 114 | 1-2208 |
| hu.21 capsid protein VP1 | GI:46487820 | | (AAS99272.1/GI:46487821) |
| (cap) gene, complete cds | | | |
| Adeno-associated virus isolate | AY530588.1/ | 115 | 1-2208 |
| hu.22 capsid protein VP1 | GI:46487822 | | (AAS99273.1/GI:46487823) |
| (cap) gene, complete cds | | | |
| Adeno-associated virus isolate | AY530589.1/ | 116 | 1-2208 |
| hu.23 capsid protein VP1 | GI:46487824 | | (AAS99274.1/GI:46487825) |
| (cap) gene, complete cds | | | |
| Adeno-associated virus isolate | AY530590.1/ | 114 | 1-2208 |
| hu.24 capsid protein VP1 | GI:46487826 | | (AAS99275.1/GI:46487827) |
| (cap) gene, complete cds | | | |
| Adeno-associated virus isolate | AY530591.1/ | 117 | 1-2208 |
| hu.25 capsid protein VP1 | GI:46487828 | | (AAS99276.1/GI:46487829) |
| (cap) gene, complete cds | | | |
| Adeno-associated virus isolate | AY530592.1/ | 118 | 1-2208 |
| hu.27 capsid protein VP1 | GI:46487830 | | (AAS99277.1/GI:46487831) |
| (cap) gene, complete cds | | | |
| Adeno-associated virus isolate | AY530593.1/ | 119 | 1-2208 |
| hu.28 capsid protein VP1 | GI:46487832 | | (AAS99278.1/GI:46487833) |
| (cap) gene, complete cds | | | |
| Adeno-associated virus isolate | AY530594.1/ | 120 | 1-2208 |
| hu.29 capsid protein VP1 | GI:46487834 | | (AAS99279.1/GI:46487835) |
| (cap) gene, complete cds | | | |
| Adeno-associated virus isolate | AY530595.1/ | 121 | 1-2211 |
| hu.3 capsid protein VP1 (cap) | GI:46487836 | | (AAS99280.1/GI:46487837) |
| gene, complete cds | | | |
| Adeno-associated virus isolate | AY530596.1/ | 122 | 1-2211 |
| hu.31 capsid protein VP1 | GI:46487838 | | (AAS99281.1/GI:46487839) |
| (cap) gene, complete cds | | | |
| Adeno-associated virus isolate | AY530597.1/ | 123 | 1-2211 |
| hu.32 capsid protein VP1 | GI:46487840 | | (AAS99282.1/GI:46487841) |
| (cap) gene, complete cds | | | |
| Adeno-associated virus isolate | AY530598.1/ | 124 | 1-2208 |
| hu.34 capsid protein VP1 | GI:46487842 | | (AAS99283.1/GI:46487843) |
| (cap) gene, complete cds | | | |
| Adeno-associated virus isolate | AY530599.1/ | 125 | 1-2208 |
| hu.35 capsid protein VP1 | GI:46487844 | | (AAS99284.1/GI:46487845) |
| (cap) gene, complete cds | | | |
| Adeno-associated virus isolate | AY530600.1/ | 126 | 1-2217 |
| hu.37 capsid protein VP1 | GI:46487846 | | (AAS99285.1/GI:46487847) |
| (cap) gene, complete cds | | | |
| Adeno-associated virus isolate | AY530601.1/ | 127 | 1-2217 |
| hu.39 capsid protein VP1 | GI:46487848 | | (AAS99286.1/GI:46487849) |
| (cap) gene, complete cds | | | |
| Adeno-associated virus isolate | AY530602.1/ | 128 | 1-2208 |
| hu.4 capsid protein VP1 (cap) | GI:46487850 | | (AAS99287.1/GI:46487851) |
| gene, complete cds | | | |
| Adeno-associated virus isolate | AY530603.1/ | 129 | 1-2217 |
| hu.40 capsid protein VP1 | GI:46487852 | | (AAS99288.1/GI:46487853) |
| (cap) gene, complete cds | | | |
| Adeno-associated virus isolate | AY530604.1/ | 130 | 1-2217 |
| hu.41 capsid protein VP1 | GI:46487854 | | (AAS99289.1/GI:46487855) |
| (cap) gene, complete cds | | | |
| Adeno-associated virus isolate | AY530605.1/ | 131 | 1-2217 |
| hu.42 capsid protein VP1 | GI:46487856 | | (AAS99290.1/GI:46487857) |
| (cap) gene, complete cds | | | |
| Adeno-associated virus isolate | AY530606.1/ | 132 | 1-2214 |
| hu.43 capsid protein VP1 | GI:46487858 | | (AAS99291.1/GI:46487859) |
| (cap) gene, complete cds | | | |
| Adeno-associated virus isolate | AY530607.1/ | 133 | 1-2211 |
| hu.44 capsid protein VP1 | GI:46487860 | | (AAS99292.1/GI:46487861) |
| (cap) gene, complete cds | | | |
| Adeno-associated virus isolate | AY530608.1/ | 134 | 1-2208 |
| hu.45 capsid protein VP1 | GI:46487862 | | (AAS99293.1/GI:46487863) |
| (cap) gene, complete cds | | | |
| Adeno-associated virus isolate | AY530609.1/ | 135 | 1-2211 |
| hu.46 capsid protein VP1 | GI:46487864 | | (AAS99294.1/GI:46487865) |
| (cap) gene, complete cds | | | |
| Adeno-associated virus isolate | AY530610.1/ | 136 | 1-2208 |
| hu.47 capsid protein VP1 | GI:46487866 | | (AAS99295.1/GI:46487867) |
| (cap) gene, complete cds | | | |
| Adeno-associated virus isolate | AY530611.1/ | 137 | 1-2211 |
| hu.48 capsid protein VP1 | GI:46487868 | | (AAS99296.1/GI:46487869) |
| (cap) gene, complete cds | | | |
| Adeno-associated virus isolate | AY530612.1/ | 138 | 1-2208 |
| hu.49 capsid protein VP1 | GI:46487870 | | (AAS99297.1/GI:46487871) |
| (cap) gene, complete cds | | | |
| Adeno-associated virus isolate | AY530613.1/ | 139 | 1-2208 |
| hu.51 capsid protein VP1 | GI:46487872 | | (AAS99298.1/GI:46487873) |
| (cap) gene, complete cds | | | |
| Adeno-associated virus isolate | AY530614.1/ | 140 | 1-2208 |
| hu.52 capsid protein VP1 | GI:46487874 | | (AAS99299.1/GI:46487875) |
| (cap) gene, complete cds | | | |
| Adeno-associated virus isolate | AY530615.1/ | 141 | 1-2205 |
| hu.53 capsid protein VP1 | GI:46487876 | | (AAS99300.1/GI:46487877) |
| (cap) gene, complete cds | | | |
| Adeno-associated virus isolate | AY530616.1/ | 142 | 1-2205 |
| hu.54 capsid protein VP1 | GI:46487878 | | (AAS99301.1/GI:46487879) |
| (cap) gene, complete cds | | | |
| Adeno-associated virus isolate | AY530617.1/ | 143 | 1-2205 |
| hu.55 capsid protein VP1 | GI:46487880 | | (AAS99302.1/GI:46487881) |
| (cap) gene, complete cds | | | |
| Adeno-associated virus isolate | AY530618.1/ | 144 | 1-2208 |
| hu.56 capsid protein VP1 | GI:46487882 | | (AAS99303.1/GI:46487883) |
| (cap) gene, complete cds | | | |
| Adeno-associated virus isolate | AY530619.1/ | 145 | 1-2205 |
| hu.57 capsid protein VP1 | GI:46487884 | | (AAS99304.1/GI:46487885) |
| (cap) gene, complete cds | | | |
| Adeno-associated virus isolate | AY530620.1/ | 146 | 1-2208 |
| hu.58 capsid protein VP1 | GI:46487886 | | (AAS99305.1/GI:46487887) |
| (cap) gene, complete cds | | | |
| Adeno-associated virus isolate | AY530621.1/ | 147 | 1-2217 |
| hu.6 capsid protein VP1 (cap) | GI:46487888 | | (AAS99306.1/GI:46487889) |
| gene, complete cds | | | |
| Adeno-associated virus isolate | AY530622.1/ | 148 | 1-2208 |
| hu.60 capsid protein VP1 | GI:46487890 | | (AAS99307.1/GI:46487891) |
| (cap) gene, complete cds | | | |
| Adeno-associated virus isolate | AY530623.1/ | 149 | 1-2208 |
| hu.61 capsid protein VP1 | GI:46487892 | | (AAS99308.1/GI:46487893) |
| (cap) gene, complete cds | | | |
| Adeno-associated virus isolate | AY530624.1/ | 150 | 1-2208 |
| hu.63 capsid protein VP1 | GI:46487894 | | (AAS99309.1/GI:46487895) |
| (cap) gene, complete cds | | | |
| Adeno-associated virus isolate | AY530625.1/ | 151 | 1-2208 |
| hu.64 capsid protein VP1 | GI:46487896 | | (AAS99310.1/GI:46487897) |
| (cap) gene, complete cds | | | |
| Adeno-associated virus isolate | AY530626.1/ | 152 | 1-2217 |
| hu.66 capsid protein VP1 | GI:46487898 | | (AAS99311.1/GI:46487899) |
| (cap) gene, complete cds | | | |
| Adeno-associated virus isolate | AY530627.1/ | 153 | 1-2217 |
| hu.67 capsid protein VP1 | GI:46487900 | | (AAS99312.1/GI:46487901) |
| (cap) gene, complete cds | | | |
| Adeno-associated virus isolate | AY530628.1/ | 154 | 1-2208 |
| hu.7 capsid protein VP1 (cap) | GI:46487902 | | (AAS99313.1/GI:46487903) |
| gene, complete cds | | | |
| Adeno-associated virus isolate | AY530629.1/ | 155 | 1-2208 |
| hu.9 capsid protein VP1 (cap) | GI:46487904 | | (AAS99314.1/GI:46487905) |
| gene, complete cds | | | |
| Adeno-associated virus isolate | AY695370.1/ | 156 | 1-2208 |
| hu.T17 capsid protein VP1 | GI:51512230 | | (AAU05358.1/GI:51512231) |
| (cap) gene, complete cds | | | |
| Adeno-associated virus isolate | AY695377.1/ | 157 | 1-2208 |
| hu.LG15 capsid protein VP1 | GI:51512250 | | (AAU05371.1/GI:51512251) |
| (cap) gene, complete cds | | | |
| Adeno-associated virus isolate | AY695378.1/ | 158 | 1-2208 |
| hu.T41 capsid protein VP1 | GI:51512252 | | (AAU05372.1/GI:51512253) |
| (cap) gene, complete cds | | | |
| Adeno-associated virus isolate | JX896664.1/ | 159 | 1-2181 |
| AAVpo6 capsid protein VP1 | GI:429842375 | | (AGA15924.1/GI:429842376) |
| gene, complete cds | | | |
| Adeno-associated virus isolate | JX896665.1/ | 160 | 1-2181 |
| AAVpo2.1 capsid protein VP1 | GI:429842377 | | (AGA15925.1/GI:429842378) |
| gene, complete cds | | | |
| Adeno-associated virus isolate | JX896666.1/ | 161 | 1-2151 |
| AAVpo5 capsid protein VP1 | GI:429842379 | | (AGA15926.1/GI:429842380) |
| gene, complete cds | | | |
| Adeno-associated virus isolate | JX896667.1/ | 162 | 1-2184 |
| AAVpo4 capsid protein VP1 | GI:429842381 | | (AGA15927.1/GI:429842382) |
| gene, complete cds | | | |
| Adeno-associated virus capsid | AY683556.1/ | 163 | 1-201 |
| protein gene, partial cds | GI:56418346 | | (AAV90981.1/GI:56418347) |
| Adeno-associated virus capsid | AY683557.1/ | 164 | 1-201 |
| protein gene, partial cds | GI:56418348 | | (AAV90982.1/GI:56418349) |
| Adeno-associated virus capsid | AY683558.1/ | 165 | 1-201 |
| protein gene, partial cds | GI:56418350 | | (AAV90983.1/GI:56418351) |
| Adeno-associated virus isolate | EU368909.1/ | 166 | 1-2208 |
| AAV6.1 capsid protein VP1 | GI:171850122 | | (ACB55301.1/GI:171850123) |
| gene, partial cds | | | |
| Adeno-associated virus isolate | EU368910.1/ | 167 | 1-2208 |
| AAV6.2 capsid protein VP1 | GI:171850124 | | (ACB55302.1/GI:171850125) |
| gene, partial cds | | | |
| Adeno-associated virus isolate | EU368911.1/ | 168 | 1-2208 |
| AAV6R2 capsid protein VP1 | GI:171850126 | | (ACB55303.1/GI:171850127) |
| gene, partial cds | | | |
| Adeno-associated virus isolate | EU368912.1/ | 169 | 1-2205 |
| ch.5R capsid protein VP1 | GI:171850128 | | (ACB55304.1/GI:171850129) |
| gene, partial cds | | | |
| Adeno-associated virus isolate | EU368913.1/ | 170 | 1-2184 |
| cy.1R1 capsid protein VP1 | GI:171850130 | | (ACB55305.1/GI:171850131) |
| gene, partial cds | | | |
| Adeno-associated virus isolate | EU368914.1/ | 171 | 1-2184 |
| cy.5R4 capsid protein VP1 | GI:171850132 | | (ACB55306.1/GI:171850133) |
| gene, partial cds | | | |
| Adeno-associated virus isolate | EU368915.1/ | 172 | 1-2205 |
| hu.29r capsid protein VP1 | GI:171850134 | | (ACB55307.1/GI:171850135) |
| gene, partial cds | | | |
| Adeno-associated virus isolate | EU368916.1/ | 173 | 1-2208 |
| hu.44R2 capsid protein VP1 | GI:171850136 | | (ACB55308.1/GI:171850137) |
| gene, partial cds | | | |
| Adeno-associated virus isolate | EU368917.1/ | 174 | 1-2208 |
| hu.44r3 capsid protein VP1 | GI:171850138 | | (ACB55309.1/GI:171850139) |
| gene, partial cds | | | |
| Adeno-associated virus isolate | EU368918.1/ | 175 | 1-2208 |
| hu.48R3 capsid protein VP1 | GI:171850140 | | (ACB55310.1/GI:171850141) |
| gene, partial cds | | | |
| Adeno-associated virus isolate | EU368919.1/ | 176 | 1-2214 |
| rh.2R capsid protein VP1 | GI:171850142 | | (ACB55311.1/GI:171850143) |
| gene, partial cds | | | |
| Adeno-associated virus isolate | EU368920.1/ | 177 | 1-2187 |
| rh.37R2 capsid protein VP1 | GI:171850144 | | (ACB55312.1/GI:171850145) |
| gene, partial cds | | | |
| Adeno-associated virus isolate | EU368921.1/ | 178 | 1-2214 |
| rh.39 capsid protein VP1 gene, | GI:171850146 | | (ACB55313.1/GI:171850147) |
| partial cds | | | |
| Adeno-associated virus isolate | EU368922.1/ | 179 | 1-2214 |
| rh.46 capsid protein VP1 gene, | GI:171850148 | | (ACB55314.1/GI:171850149) |
| partial cds | | | |
| Adeno-associated virus isolate | EU368923.1/ | 180 | 1-2211 |
| rh.48R2 capsid protein VP1 | GI:171850150 | | (ACB55315.1/GI:171850151) |
| gene, partial cds | | | |
| Adeno-associated virus isolate | EU368924.1/ | 181 | 1-2214 |
| rh.64R1 capsid protein VP1 | GI:171850152 | | (ACB55316.1/GI:171850153) |
| gene, partial cds | | | |
| Adeno-associated virus isolate | EU368925.1/ | 182 | 1-2208 |
| rh.8R capsid protein VP1 | GI:171850154 | | (ACB55317.1/GI:171850155) |
| gene, partial cds | | | |
| Adeno-associated virus isolate | EU368926.1/ | 183 | 1-2199 |
| rh32.33 capsid protein VP1 | GI:171850156 | | (ACB55318.1/GI:171850157) |
| gene, partial cds | | | |
| Adeno-associated virus - Po2 | FJ688148.1/ | 184 | 1-1338 |
| VP1 gene, partial cds | GI:224384443 | | (ACN42944.1/GI:224384444) |
| Adeno-associated virus - Po3 | FJ688146.1/ | 185 | 1-1500 |
| VP1 gene, partial cds | GI:224384436 | | (ACN42939.1/GI:224384437) |
| Adeno-associated virus 9 | AY530579.1/ | 80 | 1-2211 |
| isolate hu.14 capsid protein | GI:46487804 | | (AAS99264.1/GI:46487805) |
| VP1 (cap), complete cds | | | |
| Caprine adeno-associated | AY724675.1/ | 186 | 1-2181 |
| virus 1 isolate AAV-Go.1 | GI:52630844 | | (AAU84890.1/GI:52630845) |
| capsid protein (cap) gene, | | | |
| complete cds | | | |
| Bat adeno-associated virus | GU226879.1/ | 187 | 1-447 |
| isolate 1008-HB-Mr capsid | GI:290467598 | | (ADD26594.1/GI:290467599) |
| protein (cap) gene, partial cds | | | |
| Bat adeno-associated virus | GU226880.1/ | 188 | 1-462 |
| isolate 1019-HB-Rs capsid | GI:290467600 | | (ADD26595.1/GI:290467601) |
| protein (cap) gene, partial cds | | | |
| Bat adeno-associated virus | GU226881.1/ | 189 | 1-447 |
| isolate 1199-HN-Ra capsid | GI:290467602 | | (ADD26596.1/GI:290467603) |
| protein (cap) gene, partial cds | | | |
| Bat adeno-associated virus | GU226882.1/ | 190 | 1-447 |
| isolate 1203-HN-Ra capsid | GI:290467604 | | (ADD26597.1/GI:290467605) |
| protein (cap) gene, partial cds | | | |
| Bat adeno-associated virus | GU226883.1/ | 191 | 1-462 |
| isolate 1285-YN-Mr capsid | GI:290467606 | | (ADD26598.1/GI:290467607) |
| protein (cap) gene, partial cds | | | |
| Bat adeno-associated virus | GU226884.1/ | 192 | 1-456 |
| isolate 1288-YN-Mr capsid | GI:290467608 | | (ADD26599.1/GI:290467609) |
| protein (cap) gene, partial cds | | | |
| Bat adeno-associated virus | GU226885.1/ | 193 | 1-456 |
| isolate 1296-YN-Mr capsid | GI:290467610 | | (ADD26600.1/GI:29046761) |
| protein (cap) gene, partial cds | | | |
| Bat adeno-associated virus | GU226886.1/ | 194 | 1-456 |
| isolate 1297-YN-Md capsid | GI:290467612 | | (ADD26601.1/GI:290467613) |
| protein (cap) gene, partial cds | | | |
| Bat adeno-associated virus | GU226887.1/ | 195 | 1-456 |
| isolate 1298-YN-Mr capsid | GI:290467614 | | (ADD26602.1/GI:290467615) |
| protein (cap) gene, partial cds | | | |
| Bat adeno-associated virus | GU226888.1/ | 195 | 1-456 |
| isolate 1330-YN-Mis capsid | GI:290467616 | | (ADD26603.1/GI:290467617) |
| protein (cap) gene, partial cds | | | |
| Bat adeno-associated virus | GU226889.1/ | 195 | 1-456 |
| isolate 1339-YN-Mr capsid | GI:290467618 | | (ADD26604.1/GI:290467619) |
| protein (cap) gene, partial cds | | | |
| Bat adeno-associated virus | GU226890.1/ | 196 | 1-456 |
| isolate 1356-YN-Mis capsid | GI:290467620 | | (ADD26605.1/GI:290467621) |
| protein (cap) gene, partial cds | | | |
| Bat adeno-associated virus | GU226891.1/ | 196 | 1-456 |
| isolate 1361-YN-Md capsid | GI:290467622 | | (ADD26606.1/GI:290467623) |
| protein (cap) gene, partial cds | | | |
| Bat adeno-associated virus | GU226892.1/ | 197 | 1-444 |
| isolate 1445-GD-Rs capsid | GI:290467624 | | (ADD26607.1/GI:290467625) |
| protein (cap) gene, partial cds | | | |
| Bat adeno-associated virus | GU226893.1/ | 198 | 1-444 |
| isolate 1451-GD-Rs capsid | GI:290467626 | | (ADD26608.1/GI:290467627) |
| protein (cap) gene, partial cds | | | |
| Bat adeno-associated virus | GU226894.1/ | 199 | 1-444 |
| isolate 1454-GD-Rs capsid | GI:290467628 | | (ADD26609.1/GI:290467629) |
| protein (cap) gene, partial cds | | | |
| Bat adeno-associated virus | GU226895.1/ | 200 | 1-462 |
| isolate 1491-GD-Sk capsid | GI:290467630 | | (ADD26610.1/GI:290467631) |
| protein (cap) gene, partial cds | | | |
| Bat adeno-associated virus | GU226896.1/ | 201 | 1-462 |
| isolate 1497-GD-Sk capsid | GI:290467632 | | (ADD26611.1/GI:290467633) |
| protein (cap) gene, partial cds | | | |
| Bat adeno-associated virus | GU226897.1/ | 202 | 1-462 |
| isolate 1503-GD-Sk capsid | GI:290467634 | | (ADD26612.1/GI:290467635) |
| protein (cap) gene, partial cds | | | |
| Bat adeno-associated virus | GU226898.1/ | 203 | 1-462 |
| isolate 1512-GD-Sk capsid | GI:290467636 | | (ADD26613.1/GI:290467637) |
| protein (cap) gene, partial cds | | | |
| Bat adeno-associated virus | GU226899.1/ | 204 | 1-453 |
| isolate 1514-GD-Sk capsid | GI:290467638 | | (ADD26614.1/GI:290467639) |
| protein (cap) gene, partial cds | | | |
| Bat adeno-associated virus | GU226900.1/ | 205 | 1-453 |
| isolate 1519-GD-Hl capsid | GI:290467640 | | (ADD26615.1/GI:290467641) |
| protein (cap) gene, partial cds | | | |
| Bat adeno-associated virus | GU226901.1/ | 206 | 1-456 |
| isolate 973-HB-Mr capsid | GI:290467642 | | (ADD26616.1/GI:290467643) |
| protein (cap) gene, partial cds | | | |
| Bat adeno-associated virus | GU226902.1/ | 207 | 1-453 |
| isolate 986-HB-Ha capsid | GI:290467644 | | (ADD26617.1/GI:290467645) |
| protein (cap) gene, partial cds | | | |
| Bat adeno-associated virus | GU226903.1/ | 206 | 1-456 |
| isolate 1003-HB-Mr capsid | GI:290467646 | | (ADD26618.1/GI:290467647) |
| protein (cap) gene, partial cds | | | |
| Bat adeno-associated virus | GU226904.1/ | 208 | 1-456 |
| isolate 1053-TJ-Mr capsid | GI:290467648 | | (ADD26619.1/GI:290467649) |
| protein (cap) gene, partial cds | | | |
| Bat adeno-associated virus | GU226905.1/ | 187 | 1-447 |
| isolate 1181-HN-Ra capsid | GI:290467650 | | (ADD26620.1/GI:290467651) |
| protein (cap) gene, partial cds | | | |
| Bat adeno-associated virus | GU226906.1/ | 209 | 1-444 |
| isolate 1280-YN-Rm capsid | GI:290467652 | | (ADD26621.1/GI:290467653) |
| protein (cap) gene, partial cds | | | |
| Bat adeno-associated virus | GU226907.1/ | 210 | 1-456 |
| isolate 1345-YN-Md capsid | GI:290467654 | | (ADD26622.1/GI:290467655) |
| protein (cap) gene, partial cds | | | |
| Bat adeno-associated virus | GU226908.1/ | 211 | 1-456 |
| isolate 1357-YN-Mis capsid | GI:290467656 | | (ADD26623.1/GI:290467657) |
| protein (cap) gene, partial cds | | | |
| Bat adeno-associated virus | GU226909.1/ | 212 | 1-462 |
| isolate 1372-YN-Ha capsid | GI:290467658 | | (ADD26624.1/GI:290467659) |
| protein (cap) gene, partial cds | | | |
| Bat adeno-associated virus | GU226910.1/ | 213 | 1-444 |
| isolate 1396-YN-Ra capsid | GI:290467660 | | (ADD26625.1/GI:290467661) |
| protein (cap) gene, partial cds | | | |
| Bat adeno-associated virus | GU226911.1/ | 214 | 1-444 |
| isolate 1399-YN-Ra capsid | GI:290467662 | | (ADD26626.1/GI:290467663) |
| protein (cap) gene, partial cds | | | |
| Bat adeno-associated virus | GU226912.1/ | 215 | 1-444 |
| isolate 1441-GD-Ra capsid | GI:290467664 | | (ADD26627.1/GI:290467665) |
| protein (cap) gene, partial cds | | | |
| Bat adeno-associated virus | GU226913.1/ | 216 | 1-453 |
| isolate 1534-GD-Hl capsid | GI:290467666 | | (ADD26628.1/GI:290467667) |
| protein (cap) gene, partial cds | | | |
| Bat adeno-associated virus | GU226914.1/ | 217 | 1-444 |
| isolate 1596-HB-Rs capsid | GI:290467668 | | (ADD26629.1/GI:290467669) |
| protein (cap) gene, partial cds | | | |
| Bat adeno-associated virus | GU226915.1/ | 218 | 1-456 |
| isolate 1710-HB-Mr capsid | GI:290467670 | | (ADD26630.1/GI:290467671) |
| protein (cap) gene, partial cds | | | |
| Bat adeno-associated virus | GU226916.1/ | 219 | 1-456 |
| isolate 1721-HB-Rs capsid | GI:290467672 | | (ADD26631.1/GI:290467673) |
| protein (cap) gene, partial cds | | | |
| Bat adeno-associated virus | HQ142870.1/ | 220 | 1-447 |
| isolate 1167-HN-Ra-A capsid | GI:304323342 | | (ADM24808.1/GI:304323343) |
| protein (cap) gene, partial cds | | | |
| Bat adeno-associated virus | HQ142871.1/ | 221 | 1-444 |
| isolate 1167-HN-Ra-B capsid | GI:304323344 | | (ADM24809.1/GI:304323345) |
| protein (cap) gene, partial cds | | | |
| Bat adeno-associated virus | HQ142872.1/ | 222 | 1-456 |
| isolate 1302-YN-Mr-A capsid | GI:304323346 | | (ADM24810.1/GI:304323347) |
| protein (cap) gene, partial cds | | | |
| Bat adeno-associated virus | HQ142873.1/ | 223 | 1-462 |
| isolate 1302-YN-Mr-B capsid | GI:304323348 | | (ADM24811.1/GI:304323349) |
| protein (cap) gene, partial cds | | | |
| Bat adeno-associated virus | HQ142874.1/ | 224 | 1-456 |
| isolate 1354-YN-Mr-A capsid | GI:304323350 | | (ADM24812.1/GI:304323351) |
| protein (cap) gene, partial cds | | | |
| Bat adeno-associated virus | HQ142875.1/ | 225 | 1-462 |
| isolate 1354-YN-Mr-B capsid | GI:304323352 | | (ADM24813.1/GI:304323353) |
| protein (cap) gene, partial cds | | | |
| Bat adeno-associated virus | HQ142876.1/ | 226 | 1-462 |
| isolate 1715-HB-Rs-A capsid | GI:304323354 | | (ADM24814.1/GI:304323355) |
| protein (cap) gene, partial cds | | | |
| Bat adeno-associated virus | HQ142877.1/ | 227 | 1-444 |
| isolate 1715-HB-Rs-B capsid | GI:304323356 | | (ADM24815.1/GI:304323357) |
| protein (cap) gene, partial cds | | | |
| Bat adeno-associated virus | HQ142878.1/ | 228 | 1-444 |
| isolate 1715-HB-Rs-C capsid | GI:304323358 | | (ADM24816.1/GI:304323359) |
| protein (cap) gene, partial cds | | | |
| Bat adeno-associated virus | HQ142879.1/ | 194 | 1-456 |
| isolate 1278-YN-Mr capsid | GI:304323360 | | (ADM24817.1/GI:304323361) |
| protein (cap) gene, partial cds | | | |
| Bat adeno-associated | JX863728.1/ | 229 | 1-440 |
| virus isolate WOR1 capsid | GI:490338873 | | (AGL09967.1/GI:490338874) |
| protein (Cap) gene, partial cds | | | |
| Bat adeno-associated virus | HM228878.1/ | 230 | 1-500 |
| GF-4a capsid gene, partial cds | GI:297598977 | | (ADI48256.1/GI:297598978) |
| Duck parvovirus strain 90- | AY382891.1/ | 231 | 1-2199 |
| 0215 capsid protein (VP1) | GI:38569531 | | (AAR24365.1/GI:38569532) |
| gene, complete cds | | | |
| Duck parvovirus strain 90- | AY382892.1/ | 232 | 1-2199 |
| 0219 capsid protein (VP1) | GI:38569533 | | (AAR24366.1/GI:38569534) |
| gene, complete cds | | | |
| Duck parvovirus strain 97- | AY382893.1/ | 233 | 1-2199 |
| 0104 capsid protein (VP1) | GI:38569535 | | (AAR24367.1/GI:38569536) |
| gene, complete cds | | | |
| Fox adeno-associated | KC878874.1/ | 234 | 1-1680 |
| virus isolate F4 capsid protein | GI:484400116 | | (AGK45557.1/GI:484400117) |
| (VP1) gene, partial cds | | | |
| Goose parvovirus strain 82- | AY382883.1/ | 235 | 1-2199 |
| 0308 capsid protein (VP1) | GI:38569515 | | (AAR24357.1/GI:38569516) |
| gene, complete cds | | | |
| Goose parvovirus strain 82- | AY382884.1/ | 236 | 1-2199 |
| 0321 capsid protein (VP1) | GI:38569517 | | (AAR24358.1/GI:38569518) |
| gene, complete cds | | | |
| Goose parvovirus strain 82- | AY382885.1/ | 237 | 1-2199 |
| 0321v capsid protein (VP1) | GI:38569519 | | (AAR24359.1/GI:38569520) |
| gene, complete cds | | | |
| Goose parvovirus strain 82- | AY382886.1/ | 238 | 1-2199 |
| 0408 capsid protein (VP1) | GI:38569521 | | (AAR24360.1/GI:38569522) |
| gene, complete cds | | | |
| Goose parvovirus strain 86- | AY382887.1/ | 239 | 1-2199 |
| 1015 capsid protein (VP1) | GI:38569523 | | (AAR24361.1/GI:38569524) |
| gene, complete cds | | | |
| Goose parvovirus strain 99- | AY382888.1/ | 240 | 1-2199 |
| 0808 capsid protein (VP1) | GI:38569525 | | (AAR24362.1/GI:38569526) |
| gene, complete cds | | | |
| Goose parvovirus strain 01- | AY382889.1/ | 241 | 1-2199 |
| 1001 capsid protein (VP1) | GI:38569527 | | (AAR24363.1/GI:38569528) |
| gene, complete cds | | | |
| Duck parvovirus strain 90- | AY382890.1/ | 242 | 1-2199 |
| 0219v capsid protein (VP1) | GI:38569529 | | (AAR24364.1/GI:38569530) |
| gene, complete cds | | | |
| Goose parvovirus strain | AY506547.1/ | 243 | 1-99 |
| HG5/82 VP1 (vp1) gene, | GI:40795865 | | (AAR91603.1/GI:40795866) |
| complete cds; VP2 (vp2) gene, | | | 436-2199 |
| partial cds; and VP3 (vp3) | | | (AAR91604.1/GI:40795867) |
| gene, complete cds | | | 595-2199 |
| | | | (AAR91605.1/GI:40795868) |
| Goose parvovirus strain GD | AY512830.1/ | 244 | 1-2199 |
| capsid protein gene, complete | GI:42433273 | | (AAS16481.1/GI:42433274) |
| cds | | | |
| Goose parvovirus capsid | DQ299421.1/ | 245 | 1-1605 |
| protein VP3 gene, complete | GI:83320498 | | (ABC02874.1/GI:83320499) |
| cds | | | |
| Goose parvovirus strain GD- | DQ665790.1/ | 246 | 1-1605 |
| 01 capsid protein (VP3) gene, | GI:110083950 | | (ABG49148.1/GI:110083951) |
| complete cds | | | |
| Goose parvovirus strain JX | EF014899.1/ | 247 | 1-1605 |
| capsid protein VP3 gene, | GI:116668466 | | (ABK15506.1/GI:116668467) |
| complete cds | | | |
| Goose parvovirus strain FY | EF014900.1/ | 248 | 1-1605 |
| capsid protein VP3 gene, | GI:116668468 | | (ABK15507.1/GI:116668469) |
| complete cds | | | |
| Goose parvovirus strain HEB | EF014901.1/ | 249 | 1-1605 |
| capsid protein VP3 gene, | GI:116668470 | | (ABK15508.1/GI:116668471) |
| complete cds | | | |
| Goose parvovirus strain QTH | EF014902.1/ | 250 | 1-1605 |
| capsid protein VP3 gene, | GI:116668472 | | (ABK15509.1/GI:116668473) |
| complete cds | | | |
| Goose parvovirus strain ZD | EF014903.1/ | 251 | 1-1605 |
| capsid protein VP3 gene, | GI:116668474 | | (ABK15510.1/GI:116668475) |
| complete cds | | | |
| Goose parvovirus strain ZZ | EF014904.1/ | 252 | 1-1605 |
| capsid protein VP3 gene, | GI:116668476 | | (ABK15511.1/GI:116668477) |
| complete cds | | | |
| Goose parvovirus strain GB | EF014905.1/ | 253 | 1-1605 |
| capsid protein VP3 gene, | GI:116668478 | | (ABK15512.1/GI:116668479) |
| complete cds | | | |
| Goose parvovirus strain CHv- | EF427928.1/ | 254 | 5-1609 |
| 1 nucleocapsid protein (VP3) | GI:126723905 | | (ABO26866.1/GI:126723906) |
| gene, complete cds | | | |
| Goose parvovirus strain | EF661584.1/ | 255 | 1-1764 |
| HBZF07 capsid protein (VP2) | GI:151176311 | | (ABR87940.1/GI:151357339) |
| gene, complete cds | | | |
| Goose parvovirus strain SCh | EU088101.1/ | 256 | 1-2199 |
| capsid protein (VP1), capsid | GI:156124940 | | (ABU50780.1/GI:156124941) |
| protein (VP2), and capsid | | | 436-2199 |
| protein (VP3) genes, complete | | | (ABU50781.1/GI:156124942) |
| cds | | | 595-2199 |
| | | | (ABU50782.1/GI:156124943) |
| Goose parvovirus strain DB3 | EU088102.1/ | 257 | 1-2199 |
| capsid protein (VP1), capsid | GI:156124944 | | (ABU50783.1/GI:156124945) |
| protein (VP2), and capsid | | | 436-2199 |
| protein (VP3) genes, complete | | | (ABU50784.1/GI:156124946) |
| cds | | | 595-2199 |
| | | | (ABU50785.1/GI:156124947) |
| Goose parvovirus strain | EU088103.1/ | 258 | 1-2199 |
| GDFSh capsid protein (VP1), | GI:156124948 | | (ABU50786.1/GI:156124949) |
| capsid protein (VP2), and | | | 436-2199 |
| capsid protein (VP3) genes, | | | (ABU50787.1/GI:156124950) |
| complete cds | | | 595-2199 |
| | | | (ABU50788.1/GI:156124951) |
| Goose parvovirus strain LN- | EU218524.1/ | 259 | 1-1605 |
| 01/06 capsid protein (VP3) | GI:159786813 | | (ABW98499.1/GI:159786814) |
| gene, complete cds | | | |
| Goose parvovirus strain SP | FJ158588.1/ | 260 | 1-1605 |
| capsid protein (VP3) gene, | GI:202072064 | | (ACH95802.1/GI:202072065) |
| complete cds | | | |
| Goose parvovirus strain | FJ240170.1/ | 261 | 1-1605 |
| GPV/CH/HLJ01/08 capsid | GI:209553937 | | (ACI62503.1/GI:209553938) |
| protein (VP3) gene, complete | | | |
| cds | | | |
| Goose parvovirus strain | FJ240171.1/ | 262 | 1-1605 |
| GPV/CH/HLJ02/08 capsid | GI:209553939 | | (ACI62504.1/GI:209553940) |
| protein (VP3) gene, complete | | | |
| cds | | | |
| Goose parvovirus strain | FJ240172.1/ | 263 | 1-1605 |
| GPV/CH/HLJ03/08 capsid | GI:209553941 | | (ACI62505.1/GI:209553942) |
| protein (VP3) gene, complete | | | |
| cds | | | |
| Goose parvovirus strain ep22 | GQ392034.1/ | 264 | 1-1605 |
| capsid protein VP3 gene, | GI:256594160 | | (ACV03834.1/GI:256594161) |
| complete cds | | | |
| Goose parvovirus strain YBLJ | JN836326.1/ | 265 | 1-1605 |
| capsid protein VP3 gene, | GI:372863692 | | (AEX99666.1/GI:372863693) |
| complete cds | | | |
| Goose parvovirus strain DQ | EF014898.1/ | 266 | 1-1605 |
| capsid protein VP3 gene, | GI:116668464 | | (ABK15505.1/GI:116668465) |
| complete cds | | | |
| Muscovy duck parvovirus | AY510603.1/ | 267 | 1-2199 |
| capsid protein gene, complete | GI:40846336 | | (AAR92460.1/GI:40846337) |
| cds | | | |
| Non-human primate Adeno- | AY242997.1/ | 268 | 1-2211 |
| associated virus isolate | GI:29650489 | | (AAO88183.1/GI:29650490) |
| AAVrh.8 capsid protein (VP1) | | | |
| gene, complete cds | | | |
| Non-human primate Adeno- | AY242998.1/ | 269 | 1-2190 |
| associated virus isolate | GI:29650491 | | (AAO88184.1/GI:29650492) |
| AAVrh.37 capsid protein | | | |
| (VP1) gene, complete cds | | | |
| Non-human primate Adeno- | AY242999.1/ | 270 | 1-2190 |
| associated virus isolate | GI:29650493 | | (AAO88185.1/GI:29650494) |
| AAVrh.36 capsid protein | | | |
| (VP1) gene, complete cds | | | |
| Non-human primate Adeno- | AY243000.1/ | 271 | 1-2190 |
| associated virus isolate | GI:29650495 | | (AAO88186.1/GI:29650496) |
| AAVrh.35 capsid protein | | | |
| (VP1) gene, complete cds | | | |
| Non-human primate Adeno- | AY243001.1/ | 272 | 1-2202 |
| associated virus isolate | GI:29650497 | | (AAO88187.1/GI:29650498) |
| AAVrh.34 capsid protein | | | |
| (VP1) gene, complete cds | | | |
| Non-human primate Adeno- | AY243002.1/ | 273 | 1-2202 |
| associated virus isolate | GI:29650499 | | (AAO88188.1/GI:29650500) |
| AAVrh.33 capsid protein | | | |
| (VP1) gene, complete cds | | | |
| Non-human primate Adeno- | AY243003.1/ | 274 | 1-2202 |
| associated virus isolate | GI:29650501 | | (AAO88189.1/GI:29650502) |
| AAVrh.32 capsid protein | | | |
| (VP1) gene, complete cds | | | |
| Non-human primate Adeno- | AY243004.1/ | 275 | 1-2202 |
| associated virus isolate | GI:29650503 | | (AAO88190.1/GI:29650504) |
| AAVrh.24 capsid protein | | | |
| (VP1) gene, complete cds | | | |
| Non-human primate Adeno- | AY243005.1/ | 276 | 1-2058 |
| associated virus isolate | GI:29650505 | | (AAO88191.1/GI:29650506) |
| AAVrh.23 capsid protein | | | |
| (VP1) gene, complete cds | | | |
| Non-human primate Adeno- | AY243006.1/ | 277 | 1-2187 |
| associated virus isolate | GI:29650507 | | (AAO88192.1/GI:29650508) |
| AAVrh.22 capsid protein | | | |
| (VP1) gene, complete cds | | | |
| Non-human primate Adeno- | AY243007.1/ | 278 | 1-2217 |
| associated virus isolate | GI:29650509 | | (AAO88193.1/GI:29650510) |
| AAVrh.2 capsid protein (VP1) | | | |
| gene, complete cds | | | |
| Non-human primate Adeno- | AY243008.1/ | 279 | 1-2208 |
| associated virus isolate | GI:29650511 | | (AAO88194.1 GI:29650512) |
| AAVrh.19 capsid protein | | | |
| (VP1) gene, complete cds | | | |
| Non-human primate Adeno- | AY243009.1/ | 280 | 1-2217 |
| associated virus isolate | GI:29650513 | | (AAO88195.1/GI:29650514) |
| AAVrh.18 capsid protein | | | |
| (VP1) gene, complete cds | | | |
| Non-human primate Adeno- | AY243010.1/ | 281 | 1-2196 |
| associated virus isolate | GI:29650515 | | (AAO88196.1/GI:29650516) |
| AAVrh.17 capsid protein | | | |
| (VP1) gene, complete cds | | | |
| Non-human primate Adeno- | AY243011.1/ | 282 | 1-2196 |
| associated virus isolate | GI:29650517 | | (AAO88197.1/GI:29650518) |
| AAVrh.16 capsid protein | | | |
| (VP1) gene, complete cds | | | |
| Non-human primate Adeno- | AY243012.1/ | 283 | 1-2202 |
| associated virus isolate | GI:29650519 | | (AAO88198.1/GI:29650520) |
| AAVrh.14 capsid protein | | | |
| (VP1) gene, complete cds | | | |
| Non-human primate Adeno- | AY243013.1/ | 284 | 1-2187 |
| associated virus isolate | GI:29650521 | | (AAO88199.1/GI:29650522) |
| AAVrh.13 capsid protein | | | |
| (VP1) gene, complete cds | | | |
| Non-human primate Adeno- | AY243014.1/ | 285 | 1-2202 |
| associated virus isolate | GI:29650523 | | (AAO88200.1/GI:29650524) |
| AAVrh.12 capsid protein | | | |
| (VP1) gene, complete cds | | | |
| Non-human primate Adeno- | AY243015.1/ | 286 | 1-2217 |
| associated virus isolate | GI:29650525 | | (AAO88201.1/GI:29650526) |
| AAVrh.10 capsid protein | | | |
| (VP1) gene, complete cds | | | |
| Non-human primate Adeno- | AY243016.1/ | 287 | 1-2187 |
| associated virus isolate | GI:29650527 | | (AAO88202.1/GI:29650528) |
| AAVcy.6 capsid protein | | | |
| (VP1) gene, complete cds | | | |
| Non-human primate Adeno- | AY243017.1/ | 288 | 1-2187 |
| associated virus isolate | GI:29650529 | | (AAO88203.1/GI:29650530) |
| AAVcy.5 capsid protein | | | |
| (VP1) gene, complete cds | | | |
| Non-human primate Adeno- | AY243018.1/ | 289 | 1-2187 |
| associated virus isolate | GI:29650531 | | (AAO88204.1/GI:29650532) |
| AAVcy.4 capsid protein | | | |
| (VP1) gene, complete cds | | | |
| Non-human primate Adeno- | AY243019.1/ | 290 | 1-2187 |
| associated virus isolate | GI:29650533 | | (AAO88205.1/GI:29650534) |
| AAVcy.3 capsid protein | | | |
| (VP1) gene, complete cds | | | |
| Non-human primate Adeno- | AY243020.1/ | 291 | 1-2214 |
| associated virus isolate | GI:29650535 | | (AAO88206.1/GI:29650536) |
| AAVcy.2 capsid protein | | | |
| (VP1) gene, complete cds | | | |
| Non-human primate Adeno- | AY243021.1/ | 292 | 1-2208 |
| associated virus isolate | GI:29650537 | | (AAO88207.1/GI:29650538) |
| AAVch.5 capsid protein | | | |
| (VP1) gene, complete cds | | | |
| Non-human primate Adeno- | AY243022.1/ | 293 | 1-2217 |
| associated virus isolate | GI:29650539 | | (AAO88208.1/GI:29650540) |
| AAVbb.2 capsid protein | | | |
| (VP1) gene, complete cds | | | |
| Non-human primate Adeno- | AY243023.1/ | 294 | 1-2217 |
| associated virus isolate | GI:29650541 | | (AAO88209.1/GI:29650542) |
| AAVbb.1 capsid protein | | | |
| (VP1) gene, complete cds | | | |
| Non-human primate Adeno- | AY243024.1/ | 295 | 1-1932 |
| associated virus isolate rh.31 | GI:29692329 | | (AY243024.1/GI:29692329) |
| capsid protein (VP1) gene, | | | |
| partial cds | | | |
| Non-human primate Adeno- | AY243025.1/ | 296 | 1-1932 |
| associated virus isolate rh.26 | GI:29692331 | | (AAO89501.1/GI:29692332) |
| capsid protein (VP1) gene, | | | |
| partial cds | | | |
| Non-human primate Adeno- | AY243026.1/ | 297 | 1-1932 |
| associated virus isolate rh.27 | GI:29692333 | | (AAO89502.1/GI:29692334) |
| capsid protein (VP1) gene, | | | |
| partial cds | | | |
| Rat adeno-associated virus 1 | DQ100363.1/ | 298 | 334-2538 |
| rep gene, partial cds; and VP1 | GI:73665999 | | (AAZ79676.1/GI:73666001) |
| capsid, VP2 capsid, and VP3 | | | 721-2538 |
| capsid genes, complete cds | | | (AAZ79677.1/GI:73666002) |
| | | | 919-2538 |
| | | | (AAZ79678.1/GI:73666003) |
| Recombinant adeno-associated | KC951539.1/ | 299 | 1-2211 |
| virus vector AAV-LK19 Cap | GI:530340506 | | (AGT20780.1/GI:530340507) |
| protein (Cap) gene, complete | | | |
| cds | | | |

[0167] In one embodiment, the adeno-associated virus sequence may be any of the capsid sequences described in International Patent Publication No. WO2010127097, the contents of which are herein incorporated by reference in its entirety, such as, but not limited to, SEQ ID NOs: 5-38 of International Patent Publication No. WO2010127097.

### II. VIRAL VECTOR ENGINEERING

### Chimeric Architecture

[0168] A “chimera” according to the present invention is an entity having two or more incongruous or heterogeneous parts or regions. The viral vectors of the present invention may be produced or contain chimeric polynucleotides or polypeptides, e.g., chimeric capsid proteins and/or chimeric genomes and/or chimeric ITRs and/or chimeric regulatory proteins and/or chimeric payloads. Any of the components of a polynucleotide or polypeptide may be chimeric. Further, polypeptides encoded by the payload, e.g., transgene may also be chimeric.

[0169] Chimeric molecules, whether capsids, rep proteins, regulatory molecules or proteins, ITRs or viral genomes, are meant to include the protein as well as the nucleic acid or polynucleotide encoding the chimera. As used herein, “chimeric polynucleotides” or “chimeric polypeptides” are those polymers having portions or regions which differ from a native, wild type or reference sequence in size, sequence, sequence pattern, modification pattern, modification position, modification percent or modification population and combinations of the foregoing. Modifications may be a conjugate or linked moiety, whether heterologous to the parent sequence, donor sequence, reference sequence or to the acceptor sequence. As used herein a “part” or “region” of a protein or polynucleotide is defined as any portion of the polymer which is less than the entire length of the protein or polynucleotide.

[0170] In some embodiments, any of the transgenes, polypeptides or modulatory nucleic acids of the present invention may be encoded by nucleic acid molecules. Where these nucleic acid molecules are chimeric, they are referred to as chimeric polynucleotides. Such nucleic acid molecules include, without limitation, DNA molecules, RNA molecules, polynucleotides, oligonucleotides, mRNA molecules, vectors, plasmids and the like. In some embodiments, the present invention may comprise cells programmed or generated to express nucleic acid molecules of the present invention.

[0171] In some embodiments, the chimeric polynucleotides, which may encode chimeric polypeptides, of the invention have a structure comprising Formula I.

5′[Aₙ]ₓ-L1-[Bₒ]_{y}-L2-[Cₚ]_{z}-L3 3′ Formula I

[0172] wherein:

[0173] each of A and B independently comprise a region of linked nucleosides;

[0174] C is an optional region of linked nucleosides;

[0175] n, o and p are independently an integer between 15-1000;

[0176] x and y are independently 1-200;

[0177] z is 0-5;

[0178] L1 and L2 are independently optional linker moieties, said linker moieties being either nucleic acid based or non-nucleic acid based; and

[0179] L3 is an optional conjugate or an optional linker moiety, said linker moiety being either nucleic acid based or non-nucleic acid based.

[0180] In like fashion, the chimeric polypeptides of the present invention may have a structure comprising Formula II.

5′[Eⱼ]ᵣ-L1-[Fₖ]ₛ-L2-[Gₗ]ₜ-L3 3′ Formula II

[0181] wherein:

[0182] each of E and F independently comprise a region of linked amino acids;

[0183] G is an optional region of linked amino acids;

[0184] j, k and l are independently an integer between 15-1000;

[0185] r and s are independently 1-200;

[0186] t is 0-5;

[0187] L1 and L2 are independently optional linker moieties, said linker moieties being either amino acid based or non-amino acid based; and

[0188] L3 is an optional conjugate or an optional linker moiety, said linker moiety being either amino acid based or non-amino acid based.

[0189] In some embodiments the chimeric polynucleotide of Formula I encodes one or more transgene proteins, peptides or polypeptides of interest and may encode any of the polypeptides having Formula II. Such encoded molecules may be encoded across two or more regions and may encode overlapping proteins.

[0190] Chimeric polynucleotides and/or polypeptides, including the parts or regions thereof, of the present invention may be classified as hemimers, gapmers, wingmers, or blockmers.

[0191] As used herein, a “hemimer” is chimeric polynucleotide and/or polypeptides comprising a region or part which comprises half of one pattern, percent, position or population of a sequence from one or more polynucleotides and/or polypeptides and half of a second pattern, percent, position or population sequence from one or more polynucleotides and/or polypeptides. The polynucleotide and/or polypeptides may be the same or different. Chimeric polynucleotides and/or polypeptides of the present invention may also comprise hemimer subregions. In one embodiment, a part or region is 50% of one and 50% of another.

[0192] In one embodiment the entire chimeric polynucleotide and/or polypeptide can be 50% of one and 50% of the other. Any region or part of any chimeric polynucleotide and/or polypeptide of the invention may be a hemimer. Types of hemimers include pattern hemimers, population hemimers or position hemimers. By definition, hemimers are 50:50 percent hemimers.

[0193] As used herein, a “gapmer” is a chimeric polynucleotide and/or polypeptide having at least three parts or regions with a gap between the parts or regions. The “gap” can comprise a region of linked nucleosides or a single nucleoside (or linked amino acids or amino acid) which differs from the chimeric nature of the two parts or regions flanking it. The two parts or regions of a gapmer may be the same or different from each other.

[0194] As used herein, a “wingmer” is a chimeric polynucleotide and/or polypeptide having at least three parts or regions with a gap between the parts or regions. Unlike a gapmer, the two flanking parts or regions surrounding the gap in a wingmer are the same in degree or kind. Such similarity may be in the length or number of nucleotide or amino acid units or in the origin of the part. The wings of a wingmer may be longer or shorter than the gap. The wing parts or regions may be 20, 30, 40, 50, 60 70, 80, 90 or 95% greater or shorter in length than the region which comprises the gap.

[0195] As used herein, a “blockmer” is a patterned polynucleotide and/or polypeptide where parts or regions are of equivalent size or number and type of part or subpart. Regions or subregions in a blockmer may be 50, 51, 52, 53, 54, 55, 56, 57, 58, 59, 60, 61 62, 63, 64, 65, 66, 67, 68, 69, 70, 71, 72, 73, 74, 75, 76, 77, 78, 79, 80, 81, 82, 83, 84, 85, 86, 87, 88, 89, 90, 91, 92, 93, 94, 95, 96, 97, 98, 99, 100, 101, 102, 103, 104, 105, 106, 107, 108, 109, 110, 111, 112, 113, 114, 115, 116, 117, 118, 119, 120, 121, 122, 123, 124, 125, 126, 127, 128, 129, 130, 131, 132, 133, 134, 135, 136, 137, 138, 139, 140, 141, 142, 143, 144, 145, 146, 147, 148, 149, 150, 151, 152, 153, 154, 155, 156, 157, 158, 159, 160, 161, 162, 163, 164, 165, 166, 167, 168, 169, 170, 171, 172, 173, 174, 175, 176, 177, 178, 179, 180, 181, 182, 183, 184, 185, 186, 187, 188, 189, 190, 191, 192, 193, 194, 195, 196, 197, 198, 199, 200, 201, 202, 203, 204, 205, 206, 207, 208, 209, 210, 211, 212, 213, 214, 215, 216, 217, 218, 219, 220, 221, 222, 223, 224, 225, 226, 227, 228, 229, 230, 231, 232, 233, 234, 235, 236, 237, 238, 239, 240, 241, 242, 243, 244, 245, 246, 247, 248, 249, 250, 251, 252, 253, 254, 255, 256, 257, 258, 259, 260, 261, 262, 263, 264, 265, 266, 267, 268, 269, 270, 271, 272, 273, 274, 275, 276, 277, 278, 279, 280, 281, 282, 283, 284, 285, 286, 287, 288, 289, 290, 291, 292, 293, 294, 295, 296, 297, 298, 299, 300, 310, 320, 330, 340, 350, 360, 370, 380, 390, 400, 410, 420, 430, 440, 450, 460, 470, 480, 490 or 500, nucleosides or amino acids long.

[0196] Chimeric polynucleotides and/or polypeptides, including the parts or regions thereof, of the present invention having a polynucleotide and/or polypeptide pattern are referred to as “pattern chimeras.” Pattern chimeras may also be referred to as blockmers. Pattern chimeras are those polynucleotides and/or polypeptides having a pattern of modifications within, across or among regions or parts.

[0197] Patterns of modifications within a part or region are those which start and stop within a defined region. Patterns of modifications across a part or region are those patterns which start in one part or region and end in another adjacent part or region. Patterns of modifications among parts or regions are those which begin and end in one part or region and are repeated in a different part or region, which is not necessarily adjacent to the first region or part.

[0198] The regions or subregions of pattern chimeras or blockmers may have simple alternating patterns such as ABAB[AB]n where each “A” and each “B” represent different polynucleotides and/or polypeptides. The pattern may repeat n number of times where n=3-300. Further, each A or B can represent from 1-2500 units (e.g., nucleosides) in the pattern. Patterns may also be alternating multiples such as AABBAABB[AABB]n (an alternating double multiple) or AAABBBAAABBB[AAABBB]n (an alternating triple multiple) pattern. The pattern may repeat n number of times where n=3-300.

[0199] Different patterns may also be mixed together to form a second order pattern. For example, a single alternating pattern may be combined with a triple alternating pattern to form a second order alternating pattern A′B′. One example would be [ABABAB][AAABBBAAABBB][ABABAB][AAABBBAAABBB][ABABAB][AAABBBAAABBB], where [ABABAB] is A′ and [AAABBBAAABBB] is B′. In like fashion, these patterns may be repeated n number of times, where n=3-300.

[0200] Patterns may include three or more different modifications to form an ABCABC[ABC]n pattern. These three component patterns may also be multiples, such as AABBCCAABBCC[AABBCC]n and may be designed as combinations with other patterns such as ABCABCAABBCCABCABCAABBCC, and may be higher order patterns.

[0201] Regions or subregions of position, percent, and population patterns need not reflect an equal contribution from each type. They may form series such as “1-2-3-4”, “1-2-4-8”, where each integer represents the number of units of a particular type. Alternatively, they may be odd only, such as ‘1-3-3-1-3-1-5” or even only “2-4-2-4-6-4-8” or a mixture of both odd and even number of units such as “1-3-4-2-5-7-3-3-4”.

[0202] Pattern chimeras may vary in their sequence by degree (such as those described above) or by kind (e.g., different donor sequences).

[0203] Chimeric polynucleotides and/or polypeptides, including the parts or regions thereof, of the present invention having at least one region with two or more different sequences of two or more members of the same donor sequence (e.g., AAV2, AAV8, AAV5, etc.) are referred to as “positionally modified” chimeras. Positionally modified chimeras are also referred to herein as “selective placement” chimeras or “selective placement polynucleotides and/or polypeptides.”

[0204] The chimeric polynucleotides and/or polypeptides of the present invention may be structurally modified. As used herein, a “structural” modification is one in which two or more linked nucleosides or amino acids are inserted, deleted, duplicated, inverted or randomized in a chimeric polynucleotide and/or polypeptide, respectively without significant chemical modification to the nucleotides or amino acids themselves. Because chemical bonds will necessarily be broken and reformed to effect a structural modification, structural modifications are of a chemical nature and hence are chemical modifications. However, structural modifications will result in a different sequence of nucleotides and/or amino acids.

[0205] In some embodiments of the invention, the chimeric polynucleotides may encode two or more transgenes, proteins or peptides or modulatory nucleic acids.

[0206] The regions or parts of the chimeric polynucleotides and/or polypeptides of the present invention may be separated by a linker or spacer moiety. Such linkers or spaces may be nucleic acid based or non-nucleosidic or as with polypeptides may be amino acid based or non-amino acid based.

### Polypeptide Design; Structural, Non-Structural and Payload

[0207] Polypeptides of the invention, whether or not chimeric and whether or not structural or nonstructural, may exist as a whole polypeptide, a plurality of polypeptides or fragments of polypeptides, which independently may be encoded by one or more nucleic acids, a plurality of nucleic acids, fragments of nucleic acids or variants of any of the aforementioned. As used herein, the term “polypeptide” refers to a polymer of amino acid residues (natural or unnatural) linked together most often by peptide bonds. The term, as used herein, refers to proteins, polypeptides, and peptides of any size, structure, or function. In some instances the polypeptide encoded is smaller than about 50 amino acids and the polypeptide is then termed a peptide. If the polypeptide is a peptide, it will be at least about 2, 3, 4, or at least 5 amino acid residues long. Thus, polypeptides include gene products, naturally occurring polypeptides, synthetic polypeptides, homologs, orthologs, paralogs, fragments and other equivalents, variants, and analogs of the foregoing. A polypeptide may be a single molecule or may be a multi-molecular complex such as a dimer, trimer or tetramer. They may also comprise single chain or multichain polypeptides and may be associated or linked. The term polypeptide may also apply to amino acid polymers in which one or more amino acid residues are an artificial chemical analogue of a corresponding naturally occurring amino acid.

[0208] As used herein, the term “polypeptide variant” refers to molecules which differ in their amino acid sequence from a native or reference sequence. The amino acid sequence variants may possess substitutions, deletions, and/or insertions at certain positions within the amino acid sequence, as compared to a native or reference sequence. Ordinarily, variants will possess at least about 50% identity (homology) to a native or reference sequence, and preferably, they will be at least about 80%, more preferably at least about 90% identical (homologous) to a native or reference sequence.

[0209] In some embodiments “variant mimics” are provided. As used herein, the term “variant mimic” refers to a variant which contains one or more amino acids which would mimic a native or reference sequence. For example, glutamate may serve as a mimic for phospho-threonine and/or phospho-serine. Alternatively, variant mimics may result in deactivation or in an inactivated product containing the mimic, e.g., phenylalanine may act as an inactivating substitution for tyrosine; or alanine may act as an inactivating substitution for serine. The amino acid sequences of the compounds and/or compositions of the invention may comprise naturally occurring amino acids and as such may be considered to be proteins, peptides, polypeptides, or fragments thereof. Alternatively, the polypeptides may comprise both naturally and non-naturally occurring amino acids.

[0210] As used herein, the term “amino acid sequence variant” refers to molecules with some differences in their amino acid sequences as compared to a native or starting sequence. The amino acid sequence variants may possess substitutions, deletions, and/or insertions at certain positions within the amino acid sequence. As used herein, the terms “native” or “starting” when referring to sequences are relative terms referring to an original molecule against which a comparison may be made. Native or starting sequences should not be confused with wild type sequences. Native sequences or molecules may represent the wild-type (that sequence found in nature) but do not have to be identical to the wild-type sequence.

[0211] Ordinarily, variants will possess at least about 70% homology to a native sequence, and preferably, they will be at least about 80%, more preferably at least about 90% homologous to a native sequence.

[0212] As used herein, the term “homology” as it applies to amino acid sequences is defined as the percentage of residues in the candidate amino acid sequence that are identical with the residues in the amino acid sequence of a second sequence after aligning the sequences and introducing gaps, if necessary, to achieve the maximum percent homology. Methods and computer programs for the alignment are well known in the art. It is understood that homology depends on a calculation of percent identity but may differ in value due to gaps and penalties introduced in the calculation.

[0213] As used herein, the term “homolog” as it applies to amino acid sequences is meant the corresponding sequence of other species having substantial identity to a second sequence of a second species.

[0214] As used herein, the term “analog” is meant to include polypeptide variants which differ by one or more amino acid alterations, e.g., substitutions, additions or deletions of amino acid residues that still maintain the properties of the parent polypeptide.

[0215] As used herein, the term “derivative” is used synonymously with the term “variant” and refers to a molecule that has been modified or changed in any way relative to a reference molecule or starting molecule.

[0216] The present invention contemplates several types of polypeptides which are amino acid based including variants and derivatives. These include substitutional, insertional, deletional and covalent variants and derivatives. As such, included within the scope of this invention are polypeptides and/or polypeptide compositions comprising substitutions, insertions, additions, deletions and/or covalent modifications. For example, sequence tags or amino acids, such as one or more lysines, can be added to peptide sequences of the invention (e.g., at the N-terminal or C-terminal ends). Sequence tags can be used for peptide purification or localization. Lysines can be used to increase peptide solubility or to allow for biotinylation. Alternatively, amino acid residues located at the carboxy and amino terminal regions of the amino acid sequence of a peptide or protein may optionally be deleted providing for truncated sequences. Certain amino acids (e.g., C-terminal or N-terminal residues) may alternatively be deleted depending on the use of the sequence, as for example, expression of the sequence as part of a larger sequence which is soluble, or linked to a solid support.

[0217] “Substitutional variants” when referring to proteins are those that have at least one amino acid residue in a native or starting sequence removed and a different amino acid inserted in its place at the same position. The substitutions may be single, where only one amino acid in the molecule has been substituted, or they may be multiple, where two or more amino acids have been substituted in the same molecule.

[0218] As used herein, the term “conservative amino acid substitution” refers to the substitution of an amino acid that is normally present in the sequence with a different amino acid of similar size, charge, or polarity. Examples of conservative substitutions include the substitution of a non-polar (hydrophobic) residue such as isoleucine, valine and leucine for another non-polar residue. Likewise, examples of conservative substitutions include the substitution of one polar (hydrophilic) residue for another such as between arginine and lysine, between glutamine and asparagine, and between glycine and serine. Additionally, the substitution of a basic residue such as lysine, arginine or histidine for another, or the substitution of one acidic residue such as aspartic acid or glutamic acid for another acidic residue are additional examples of conservative substitutions. Examples of non-conservative substitutions include the substitution of a non-polar (hydrophobic) amino acid residue such as isoleucine, valine, leucine, alanine, methionine for a polar (hydrophilic) residue such as cysteine, glutamine, glutamic acid or lysine and/or a polar residue for a non-polar residue.

[0219] As used herein, the term “insertional variants” when referring to proteins are those with one or more amino acids inserted immediately adjacent to an amino acid at a particular position in a native or starting sequence. As used herein, the term “immediately adjacent” refers to an adjacent amino acid that is connected to either the alpha-carboxy or alpha-amino functional group of a starting or reference amino acid.

[0220] As used herein, the term “deletional variants” when referring to proteins, are those with one or more amino acids in the native or starting amino acid sequence removed. Ordinarily, deletional variants will have one or more amino acids deleted in a particular region of the molecule.

[0221] As used herein, the term “derivatives,” as referred to herein includes variants of a native or starting protein comprising one or more modifications with organic proteinaceous or non-proteinaceous derivatizing agents, and post-translational modifications. Covalent modifications are traditionally introduced by reacting targeted amino acid residues of the protein with an organic derivatizing agent that is capable of reacting with selected side-chains or terminal residues, or by harnessing mechanisms of post-translational modifications that function in selected recombinant host cells. The resultant covalent derivatives are useful in programs directed at identifying residues important for biological activity, for immunoassays, or for the preparation of anti-protein antibodies for immunoaffinity purification of the recombinant glycoprotein. Such modifications are within the ordinary skill in the art and are performed without undue experimentation.

[0222] Certain post-translational modifications are the result of the action of recombinant host cells on the expressed polypeptide. Glutaminyl and asparaginyl residues are frequently post-translationally deamidated to the corresponding glutamyl and aspartyl residues. Alternatively, these residues are deamidated under mildly acidic conditions. Either form of these residues may be present in the proteins used in accordance with the present invention.

[0223] Covalent derivatives specifically include fusion molecules in which proteins of the invention are covalently bonded to a non-proteinaceous polymer. The non-proteinaceous polymer ordinarily is a hydrophilic synthetic polymer, i.e. a polymer not otherwise found in nature. However, polymers which exist in nature and are produced by recombinant or in vitro methods are useful, as are polymers which are isolated from nature. Hydrophilic polyvinyl polymers fall within the scope of this invention, e.g. polyvinylalcohol and polyvinylpyrrolidone. Particularly useful are polyvinylalkylene ethers such a polyethylene glycol, or polypropylene glycol. The proteins may be linked to various non-proteinaceous polymers, such as polyethylene glycol, polypropylene glycol or polyoxyalkylenes, in the manner set forth in U.S. Pat. Nos. 4,640,835; 4,496,689; 4,301,144; 4,670,417; 4,791,192 or 4,179,337, the contents of each of which are herein incorporated by reference in its entirety.

[0224] As used herein, the term “features” when referring to proteins are defined as distinct amino acid sequence-based components of a molecule. Features of the proteins of the present invention include surface manifestations, local conformational shape, folds, loops, half-loops, domains, half-domains, sites, termini or any combination thereof.

[0225] As used herein, the term “surface manifestation” when referring to proteins refers to a polypeptide based component of a protein appearing on an outermost surface.

[0226] As used herein, the term “local conformational shape” when referring to proteins refers to a polypeptide based structural manifestation of a protein which is located within a definable space of the protein.

[0227] As used herein, the term “fold,” when referring to proteins, refers to the resultant conformation of an amino acid sequence upon energy minimization. A fold may occur at the secondary or tertiary level of the folding process. Examples of secondary level folds include beta sheets and alpha helices. Examples of tertiary folds include domains and regions formed due to aggregation or separation of energetic forces. Regions formed in this way include hydrophobic and hydrophilic pockets, and the like.

[0228] As used herein, the term “turn” as it relates to protein conformation, refers to a bend which alters the direction of the backbone of a peptide or polypeptide and may involve one, two, three or more amino acid residues.

[0229] As used herein, the term “loop” when referring to proteins, refers to a structural feature of a peptide or polypeptide which reverses the direction of the backbone of a peptide or polypeptide and comprises four or more amino acid residues. Oliva et al. have identified at least 5 classes of protein loops (Oliva, B. et al., An automated classification of the structure of protein loops. J Mol Biol. 1997. 266(4):814-30, the contents of which are herein incorporated by reference in its entirety).

[0230] As used herein, the term “half-loop,” when referring to proteins, refers to a portion of an identified loop having at least half the number of amino acid resides as the loop from which it is derived. It is understood that loops may not always contain an even number of amino acid residues. Therefore, in those cases where a loop contains or is identified to comprise an odd number of amino acids, a half-loop of the odd-numbered loop will comprise the whole number portion or next whole number portion of the loop (number of amino acids of the loop/2+/−0.5 amino acids). For example, a loop identified as a 7 amino acid loop could produce half-loops of 3 amino acids or 4 amino acids (7/2=3.5+/−0.5 being 3 or 4).

[0231] As used herein, the term “domain,” when referring to proteins, refers to a motif of a polypeptide having one or more identifiable structural or functional characteristics or properties (e.g., binding capacity, serving as a site for protein-protein interactions.)

[0232] As used herein, the term “half-domain,” when referring to proteins, refers to a portion of an identified domain having at least half the number of amino acid resides as the domain from which it is derived. It is understood that domains may not always contain an even number of amino acid residues. Therefore, in those cases where a domain contains or is identified to comprise an odd number of amino acids, a half-domain of the odd-numbered domain will comprise the whole number portion or next whole number portion of the domain (number of amino acids of the domain/2+/−0.5 amino acids). For example, a domain identified as a 7 amino acid domain could produce half-domains of 3 amino acids or 4 amino acids (7/2=3.5+/−0.5 being 3 or 4). It is also understood that subdomains may be identified within domains or half-domains, these subdomains possessing less than all of the structural or functional properties identified in the domains or half domains from which they were derived. It is also understood that the amino acids that comprise any of the domain types herein need not be contiguous along the backbone of the polypeptide (i.e., nonadjacent amino acids may fold structurally to produce a domain, half-domain or subdomain).

[0233] As used herein, the terms “site,” as it pertains to amino acid based embodiments is used synonymously with “amino acid residue” and “amino acid side chain.” A site represents a position within a peptide or polypeptide that may be modified, manipulated, altered, derivatized or varied within the polypeptide based molecules of the present invention.

[0234] As used herein, the terms “termini” or “terminus,” when referring to proteins refers to an extremity of a peptide or polypeptide. Such extremity is not limited only to the first or final site of the peptide or polypeptide but may include additional amino acids in the terminal regions. The polypeptide based molecules of the present invention may be characterized as having both an N-terminus (terminated by an amino acid with a free amino group (NH2)) and a C-terminus (terminated by an amino acid with a free carboxyl group (COOH)). Proteins of the invention are in some cases made up of multiple polypeptide chains brought together by disulfide bonds or by non-covalent forces (multimers, oligomers). These sorts of proteins will have multiple N- and C-termini. Alternatively, the termini of the polypeptides may be modified such that they begin or end, as the case may be, with a non-polypeptide based moiety such as an organic conjugate.

[0235] Once any of the features have been identified or defined as a component of a molecule of the invention, any of several manipulations and/or modifications of these features may be performed by moving, swapping, inverting, deleting, randomizing or duplicating. Furthermore, it is understood that manipulation of features may result in the same outcome as a modification to the molecules of the invention. For example, a manipulation which involved deleting a domain would result in the alteration of the length of a molecule just as modification of a nucleic acid to encode less than a full length molecule would.

[0236] Modifications and manipulations can be accomplished by methods known in the art such as site directed mutagenesis. The resulting modified molecules may then be tested for activity using in vitro or in vivo assays such as those described herein or any other suitable screening assay known in the art.

[0237] In some embodiments, polypeptides or the polynucleotides encoding them may comprise one or more atoms that are isotopes. As used herein, the term “isotope” refers to a chemical element that has one or more additional neutrons. In some embodiments, compounds of the present invention may be deuterated. As used herein, the term “deuterate” refers to the process of replacing one or more hydrogen atoms in a substance with deuterium isotopes. Deuterium isotopes are isotopes of hydrogen. The nucleus of hydrogen contains one proton while deuterium nuclei contain both a proton and a neutron. The compounds and/or compositions of the present invention may be deuterated in order to change one or more physical property, such as stability, or to allow polypeptides and/or polynucleotides to be used in diagnostic and/or experimental applications.

### Conjugates

[0238] It is contemplated by the present invention that the polynucleotides and/or polypeptides, including the viral vectors of the present invention may be complexed, conjugated or combined with one or more homologous or heterologous molecules. As used herein, the term “homologous molecule” refers to a molecule which is similar in at least one of structure or function relative to a starting molecule while a “heterologous molecule” is one that differs in at least one of structure or function relative to a starting molecule. Structural homologs are therefore molecules which may be substantially structurally similar. In some embodiments, such homologs may be identical. Functional homologs are molecules which may be substantially functionally similar. In some embodiments, such homologs may be identical.

[0239] Polynucleotides and/or polypeptides of the present invention may comprise conjugates. Such conjugates of the invention may include naturally occurring substances or ligands, such as proteins (e.g., human serum albumin (HSA), low-density lipoprotein (LDL), high-density lipoprotein (HDL), or globulin); carbohydrates (e.g., a dextran, pullulan, chitin, chitosan, inulin, cyclodextrin or hyaluronic acid); or lipids. Conjugates may also be recombinant or synthetic molecules, such as synthetic polymers, e.g., synthetic polyamino acids, an oligonucleotide (e.g. an aptamer). Examples of polyamino acids may include polylysine (PLL), poly L-aspartic acid, poly L-glutamic acid, styrene-maleic acid anhydride copolymer, poly(L-lactide-co-glycolied) copolymer, divinyl ether-maleic anhydride copolymer, N-(2-hydroxypropyl)methacrylamide copolymer (HMPA), polyethylene glycol (PEG), polyvinyl alcohol (PVA), polyurethane, poly(2-ethylacryllic acid), N-isopropylacrylamide polymers, or polyphosphazine. Example of polyamines include: polyethylenimine, polylysine (PLL), spermine, spermidine, polyamine, pseudopeptide-polyamine, peptidomimetic polyamine, dendrimer polyamine, arginine, amidine, protamine, cationic lipid, cationic porphyrin, quaternary salt of a polyamine, or an alpha helical peptide.

[0240] In some embodiments, conjugates may also include targeting groups. As used herein, the term “targeting group” refers to a functional group or moiety attached to an agent that facilitates localization of the agent to a desired region, tissue, cell and/or protein. Such targeting groups may include, but are not limited to cell or tissue targeting agents or groups (e.g. lectins, glycoproteins, lipids, proteins, an antibody that binds to a specified cell type such as a kidney cell or other cell type). In some embodiments, targeting groups may comprise thyrotropins, melanotropins, lectins, glycoproteins, surfactant protein A, mucin carbohydrates, multivalent lactose, multivalent galactose, N-acetyl-galactosamine, N-acetyl-gulucosamine, multivalent mannose, multivalent fucose, glycosylated polyaminoacids, multivalent galactose, transferrin, bisphosphonate, polyglutamate, polyaspartate, lipids, cholesterol, steroids, bile acids, folates, vitamin B12, biotin, an RGD peptide, an RGD peptide mimetic or an aptamer.

[0241] In some embodiments, targeting groups may be proteins, e.g., glycoproteins, or peptides, e.g., molecules having a specific affinity for a co-ligand, or antibodies e.g., an antibody, that binds to a specified cell type such as a cancer cell, endothelial cell, or bone cell. Targeting groups may also comprise hormones and/or hormone receptors.

[0242] In some embodiments, targeting groups may be any ligand capable of targeting specific receptors. Examples include, without limitation, folate, GalNAc, galactose, mannose, mannose-6-phosphate, apatamers, integrin receptor ligands, chemokine receptor ligands, transferrin, biotin, serotonin receptor ligands, PSMA, endothelin, GCPII, somatostatin, LDL, and HDL ligands. In some embodiments, targeting groups are aptamers. Such aptamers may be unmodified or comprise any combination of modifications disclosed herein.

[0243] In still other embodiments, polynucleotides, polypeptides and/or the viral vectors of the present invention may be covalently conjugated to cell penetrating polypeptides. In some embodiments, cell penetrating polypeptides may also include signal sequences. In some embodiments, conjugates of the invention may be designed to have increased stability, increased cell transfection and/or altered biodistribution (e.g., targeted to specific tissues or cell types).

[0244] In some embodiments, conjugating moieties may be added to compounds and/or compositions of the present invention such that they allow the attachment of detectable labels to targets for clearance. Such detectable labels include, but are not limited to biotin labels, ubiquitins, fluorescent molecules, human influenza hemaglutinin (HA), c-myc, histidine (His), flag, glutathione S-transferase (GST), V5 (a paramyxovirus of simian virus 5 epitope), biotin, avidin, streptavidin, horse radish peroxidase (HRP) and digoxigenin.

[0245] In some embodiments, polynucleotides, polypeptides and/or the viral vectors of the present invention may be combined with one another or other molecules in the treatment of diseases and/or conditions.

### III. PAYLOAD: TRANSGENES, POLYPEPTIDE-ENCODING POLYNUCLEOTIDES AND/OR MODULATORY NUCLEIC ACIDS

[0246] The payload construct vector of the present invention comprises a nucleic acid sequence encoding at least one “payload molecule” for replication in the viral replication cell and packaging within the viral vector. As used herein, a “payload molecule” refers to a transgene, a polynucleotide encoding a polypeptide or a modulatory nucleic acid. The payload molecule may comprise any nucleic acid packaged in the viral vector produced in accordance with the present invention for expression in a target cell transduced or contacted with the viral vector.

[0247] According to the present invention, the payload construct vector encodes a “payload construct.” As used herein, a “payload construct” is a polynucleotide sequence encoding at least a payload molecule and sufficient ITR sequence to allow for expression of the payload molecule in a cell transduced with the viral vector.

[0248] The payload molecule may comprise a polypeptide, nucleic acid (e.g., RNA molecule), or any other gene product that is desired for expression in the target cell. The payload construct may comprise a combination of coding and non-coding nucleic acid sequences.

[0249] In one embodiment, the payload construct vector comprises more than one nucleic acid sequence encoding more than one payload molecule interest. In such an embodiment, a payload construct vector encoding more than one payload molecule may be replicated and packaged into a viral vector. A target cell transduced with a viral vector comprising more than one payload molecule may express each of the payload molecules in a single cell.

[0250] In some embodiments, the payload construct vector sequence may encode a coding or non-coding RNA.

[0251] Where the payload construct vector sequence encodes a polypeptide, the polypeptide may be a peptide or protein. A protein encoded by the payload construct vector sequence may comprise a secreted protein, an intracellular protein, an extracellular protein, and/or a membrane protein. The encoded proteins may be structural or functional. Proteins encoded by the payload construct vector or payload construct include, but are not limited to, mammalian proteins. The viral vectors encoding polypeptides (e.g., mRNA) of the invention may be used in the fields of human disease, antibodies, viruses, veterinary applications and a variety of in vivo and in vitro settings.

[0252] In some embodiments, the viral vectors are useful in the field of medicine for the treatment, palliation or amelioration of conditions or diseases such as, but not limited to, blood, cardiovascular, CNS, dermatology, endocrinology, genetic, genitourinary, gastrointestinal, musculoskeletal, oncology, and immunology, respiratory, sensory and anti-infective.

[0253] In some embodiments, viral vectors in accordance with the present invention may be used for the treatment of disease, disorders, and/or conditions, including but not limited to one or more of the following: autoimmune disorders (e.g. diabetes, lupus, multiple sclerosis, psoriasis, rheumatoid arthritis); inflammatory disorders (e.g. arthritis, pelvic inflammatory disease); neurological disorders (e.g. Alzheimer's disease, Huntington's disease; autism; Parkinson's disease); cardiovascular disorders (e.g. atherosclerosis, hypercholesterolemia, thrombosis, clotting disorders, angiogenic disorders such as macular degeneration); proliferative disorders (e.g. cancer, benign neoplasms); respiratory disorders (e.g. chronic obstructive pulmonary disease); digestive disorders (e.g. inflammatory bowel disease, ulcers); musculoskeletal disorders (e.g. fibromyalgia, arthritis); endocrine, metabolic, and nutritional disorders (e.g. diabetes, osteoporosis); urological disorders (e.g. renal disease); psychological disorders (e.g. depression, schizophrenia); skin disorders (e.g. wounds, eczema); blood and lymphatic disorders (e.g. anemia, hemophilia); etc.

[0254] In one embodiment, the disease, disorder and/or condition is a neurological disease, disorder and/or condition. As a non-limiting example, the neurological disease, disorder and/or condition is a central nervous system (CNS) disorder.

[0255] In one embodiment, the disease, disorder and/or condition treated using the viral vectors described herein is a CNS disorder. As a non-limiting example, the viral vectors which may be used to treat a CNS disorder may comprise at least one polynucleotide encoding at least one peptide sequence selected from the group consisting of VRI-VRIX and HI loop as described in FIG. 4 and VRI-CNS to VRXII-CNS as described in FIG. 6.

[0256] In one embodiment, the neurological disease, disorder and/or condition is Parkinson's disease. In one embodiment, the disease, disorder and/or condition treated using the viral vectors described herein is Parkinson's disease. As a non-limiting example, the viral vectors which may be used to treat Parkinson's disease may comprise at least one polynucleotide encoding at least one peptide sequence selected from the group consisting of VRI-VRIX and HI loop as described in FIG. 4 and VRI-CNS to VRXII-CNS as described in FIG. 6.

[0257] In another embodiment, the neurological disease, disorder and/or condition is Friedreich's Ataxia. In one embodiment, the disease, disorder and/or condition treated using the viral vectors described herein is Friedreich's Ataxia. As a non-limiting example, the viral vectors which may be used to treat Friedreich's Ataxia may comprise at least one polynucleotide encoding at least one peptide sequence selected from the group consisting of VRI-VRIX and HI loop as described in FIG. 4 and VRI-CNS to VRXII-CNS as described in FIG. 6.

[0258] In another embodiment, the neurological disease, disorder and/or condition is Amyotrophic lateral sclerosis (ALS). In one embodiment, the disease, disorder and/or condition treated using the viral vectors described herein is ALS. As a non-limiting example, the viral vectors which may be used to treat ALS may comprise at least one polynucleotide encoding at least one peptide sequence selected from the group consisting of VRI-VRIX and HI loop as described in FIG. 4 and VRI-CNS to VRXII-CNS as described in FIG. 6.

[0259] In another embodiment, the neurological disease, disorder and/or condition is Huntington's disease. In one embodiment, the disease, disorder and/or condition treated using the viral vectors described herein is Huntington's disease. As a non-limiting example, the viral vectors which may be used to treat Huntington's disease may comprise at least one polynucleotide encoding at least one peptide sequence selected from the group consisting of VRI-VRIX and HI loop as described in FIG. 4 and VRI-CNS to VRXII-CNS as described in FIG. 6.

[0260] In another embodiment, the neurological disease, disorder or condition is spinal muscular atrophy (SMA). In one embodiment, the disease, disorder and/or condition treated using the viral vectors described herein is SMA. As a non-limiting example, the viral vectors which may be used to treat SMA may comprise at least one polynucleotide encoding at least one peptide sequence selected from the group consisting of VRI-VRIX and HI loop as described in FIG. 4 and VRI-CNS to VRXII-CNS as described in FIG. 6.

[0261] In some embodiments, the payload construct encodes a messenger RNA (mRNA). As used herein, the term “messenger RNA” (mRNA) refers to any polynucleotide which encodes a polypeptide of interest and which is capable of being translated to produce the encoded polypeptide of interest in vitro, in vivo, in situ or ex vivo.

[0262] Traditionally, the basic components of an mRNA molecule include at least a coding region, a 5′UTR, a 3′UTR, a 5′ cap and a poly-A tail. According to the present invention, payload constructs encoding mRNA may comprise a coding region only. They may also comprise a coding region and at least one UTR. They may also comprise a coding region, 5′UTR, 3′UTR and polyA tail.

[0263] In one embodiment the polypeptide encoded by the payload construct is between 50-5000 amino acids in length. In some embodiments the protein encoded is between 50-2000 amino acids in length. In some embodiments the protein encoded is between 50-1500 amino acids in length. In some embodiments the protein encoded is between 50-1000 amino acids in length. In some embodiments the protein encoded is between 50-800 amino acids in length. In some embodiments the protein encoded is between 50-600 amino acids in length. In some embodiments the protein encoded is between 50-400 amino acids in length. In some embodiments the protein encoded is between 50-200 amino acids in length. In some embodiments the protein encoded is between 50-100 amino acids in length.

[0264] In some embodiments the peptide encoded is between 4-50 amino acids in length. In one embodiment, the shortest length of a region of the payload molecule of the present invention encoding a peptide can be the length that is sufficient to encode for a tetrapeptide, a pentapeptide, a hexapeptide, a heptapeptide, an octapeptide, a nonapeptide, or a decapeptide. In another embodiment, the length may be sufficient to encode a peptide of 2-30 amino acids, e.g. 5-30, 10-30, 2-25, 5-25, 10-25, or 10-20 amino acids. The length may be sufficient to encode for a peptide of at least 11, 12, 13, 14, 15, 17, 20, 25 or 30 amino acids, or a peptide that is no longer than 50 amino acids, e.g. no longer than 35, 30, 25, 20, 17, 15, 14, 13, 12, 11 or 10 amino acids.

[0265] An RNA encoded by the payload construct vector sequence may comprise an mRNA, tRNA, rRNA, tmRNA, miRNA, RNAi, siRNA, piRNA, shRNA antisense RNA, double stranded RNA, snRNA, snoRNA, and long non-coding RNA (ncRNA). Examples of such lncRNA molecules and RNAi constructs designed to target such lncRNA any of which may be encoded in the payload constructs are taught in International Publication, WO2012/018881, the contents of which are incorporated herein by reference in their entirety.

[0266] In one embodiment, the payload construct encodes a microRNA or miRNA as the payload molecule. These payload molecules are also referred to as modulatory nucleic acid payloads.

[0267] microRNAs (or miRNA) are 19-25 nucleotide long noncoding RNAs that bind to the 3′UTR of nucleic acid molecules and down-regulate gene expression either by reducing nucleic acid molecule stability or by inhibiting translation. The payload constructs of the invention may comprise one or more microRNA target sequences, microRNA sequences, or microRNA seeds. Such sequences may correspond to any known microRNA such as those taught in US Publication US2005/0261218 and US Publication US2005/0059005, the contents of each of which are incorporated herein by reference in their entirety.

[0268] A microRNA sequence comprises a “seed” region, i.e., a sequence in the region of positions 2-8 of the mature microRNA, which sequence has perfect Watson-Crick complementarity to the miRNA target sequence. A microRNA seed may comprise positions 2-8 or 2-7 of the mature microRNA. In some embodiments, a microRNA seed may comprise 7 nucleotides (e.g., nucleotides 2-8 of the mature microRNA), wherein the seed-complementary site in the corresponding miRNA target is flanked by an adenine (A) opposed to microRNA position 1. In some embodiments, a microRNA seed may comprise 6 nucleotides (e.g., nucleotides 2-7 of the mature microRNA), wherein the seed-complementary site in the corresponding miRNA target is flanked by an adenine (A) opposed to microRNA position 1. See for example, Grimson A, Farh K K, Johnston W K, Garrett-Engele P, Lim L P, Bartel D P; Mol Cell. 2007 Jul. 6; 27(1):91-105; the contents of each of which is herein incorporated by reference in their entirety. The bases of the microRNA seed have complete complementarity with the target sequence.

[0269] A payload molecule may comprise polypeptides that serve as marker proteins to assess cell transformation and expression, fusion proteins, polypeptides having a desired biological activity, gene products that can complement a genetic defect, RNA molecules, transcription factors, and other gene products that are of interest in regulation and/or expression. A payload molecule may comprise nucleotide sequences that provide a desired effect or regulatory function (e.g., transposons, transcription factors). A payload molecule may comprise, but are not limited to: hormone receptors (e.g., mineralcorticosteroid, glucocorticoid, and thyroid hormone receptors); intramembrane proteins (e.g., TM-1 and TM-7); intracellular receptors (e.g., orphans, retinoids, vitamin D3 and vitamin A receptors); signaling molecules (e.g., kinases, transcription factors, or molecules such signal transducers and activators of transcription receptors of the cytokine superfamily (e.g. erythropoietin, growth hormone, interferons, and interleukins, and colony-stimulating factors; G-protein coupled receptors, e.g., hormones, calcitonin, epinephrine, gastrin, and paracrine or autocrine mediators, such as stomatostatin or prostaglandins; neurotransmitter receptors (norepinephrine, dopamine, serotonin or acetylcholine); pathogenic antigens, which can be of viral, bacterial, allergenic, or cancerous origin; and tyrosine kinase receptors (such as insulin growth factor, and nerve growth factor).

[0270] A payload molecule may comprise a gene therapy product. A gene therapy product may comprise a polypeptide, a nucleic acid (e.g., RNA molecule), or other gene product that, when expressed in a target cell, provides a desired therapeutic effect. In some embodiments, a gene therapy product may comprise a substitute for a non-functional gene that is absent or mutated. In some embodiments, a gene therapy product may comprise a method for elimination of a gene that is over-active or dysregulated. Goldsmith et al., WO 90/07936, the contents of which are incorporated herein by reference in its entirety.

[0271] A payload construct vector encoding a payload molecule may comprise a selectable marker. A selectable marker may comprise a gene sequence or a protein encoded by that gene sequence expressed in a host cell that allows for the identification, selection, and/or purification of the host cell from a population of cells that may or may not express the selectable marker. In one embodiment the selectable marker provides resistance to survive a selection process that would otherwise kill the host cell, such as treatment with an antibiotic. In some embodiments an antibiotic selectable marker may comprise one or more antibiotic resistance factors, including but not limited to neomycin resistance (e.g., neo), hygromycin resistance, kanamycin resistance, and/or puromycin resistance.

[0272] In some embodiments a selectable marker may comprise a cell-surface marker, such as any protein expressed on the surface of the cell including, but not limited to receptors, CD markers, lectins, integrins, or truncated versions thereof. In some embodiments, cells that comprise a cell-surface marker may be selected using an antibody targeted to said cell-surface marker. In some embodiments an antibody targeted to the cell-surface marker may be directly conjugated with a selection agent including, but not limited to a fluorophore, sepharose, or magnetic bead. In some embodiments an antibody targeted to the cell-surface marker may be detected using a secondary labeled antibody or substrate which binds to the antibody targeted to the cell-surface marker. In some embodiments, a selectable marker may comprise negative selection by using an enzyme, including but not limited to Herpes simplex virus thymidine kinase (HSVTK) that converts a pro-toxin (gancyclovir) into a toxin or bacterial Cytosine Deaminase (CD) which converts the pro-toxin 5′-fluorocytosine (5′-FC) into the toxin 5′-fluorouracil (5′-FU). In some embodiments, any nucleic acid sequence encoding a polypeptide can be used as a selectable marker comprising recognition by a specific antibody.

[0273] In some embodiments, a payload construct vector encoding a payload molecule may comprise a selectable marker including, but not limited to, β-lactamase, luciferase, 0-galactosidase, or any other reporter gene as that term is understood in the art, including cell-surface markers, such as CD4 or the truncated nerve growth factor (NGFR) (for GFP, see WO 96/23810; Heim et al., Current Biology 2:178-182 (1996); Heim et al., Proc. Natl. Acad. Sci. USA (1995); or Heim et al., Science 373:663-664 (1995); for β-lactamase, see WO 96/30540, the contents of each of which is herein incorporated by reference in its entirety). In some embodiments, a nucleic acid encoding a selectable marker may comprise a fluorescent protein. A fluorescent protein as herein described may comprise any fluorescent marker including but not limited to green, yellow, and/or red fluorescent protein (GFP, YFP, RFP).

[0274] In accordance with the invention, a payload molecule comprising a nucleic acid for expression in a target cell will be incorporated into the viral vector produced in the viral replication cell if said payload molecule is located between two ITR sequences, or is located on either side of an asymmetrical ITR engineered with two D regions.

[0275] A payload construct vector sequence encoding one or more payload molecules for expression in a target cell may comprise one or more nucleotide sequences operably linked to at least one target cell-compatible promoter. A person skilled in the art may recognize that a target cell may require a specific promoter including but not limited to a promoter that is species specific, inducible, tissue-specific, or cell cycle-specific Parr et al., Nat. Med. 3:1145-9 (1997), the contents of which are herein incorporated by reference in its entirety.

### IV. VIRAL PRODUCTION

[0276] Viral production of the invention disclosed herein describes processes and methods for producing viral vector that contacts a target cell to deliver a payload construct, e.g. a recombinant viral construct, which comprises a nucleotide encoding a payload molecule.

[0277] A flow diagram depicting the steps involved in one non-limiting method of large scale viral vector production using a baculoviral system is depicted in FIG. 1. Briefly, the method utilizes seed cultures of viral replication cells that have been transfected with a viral replication construct and a payload construct vector to produce two baculoviruses as depicted in FIG. 2. Seed cultures that are harvested, divided into aliquots and frozen may be used at a later time point to initiate an infection of a naïve population of cells.

[0278] Large scale production of viral vector, as depicted in the non-limiting method of FIG. 1 utilizes a bioreactor. The use of a bioreactor allows for the precise measurement and/or control of variables that support the growth and activity of viral replication cells such as mass, temperature, CO2, O2, pH, and/or optical density (OD). In one embodiment, the bioreactor is used for batch production in which the entire culture is harvested at an experimentally determined time point and viral vector is purified. In another embodiment, the bioreactor is used for continuous production in which a portion of the culture is harvested at an experimentally determined time point for purification of viral vector, and the remaining culture in the bioreactor is refreshed with additional growth media components.

[0279] Viral vector is extracted from viral replication cells in a process comprising cell lysis, clarification, and purification, as depicted in FIG. 1. Cell lysis comprises any process that disrupts the structure of the viral replication cell, thereby releasing viral vector. In some embodiments cell lysis may comprise thermal shock, chemical, or mechanical lysis methods. Clarification comprises the gross purification of the mixture of lysed cells, media components, and viral vector. In some embodiments, clarification comprises centrifugation and/or filtration, including but not limited to depth end, tangential flow, and/or hollow fiber filtration.

[0280] The end result of viral production is a purified viral vector. Accordingly, a viral vector comprises two components: a payload construct, e.g. a recombinant viral construct and optionally a viral capsid.

### Expression Constructs

[0281] Viral production of the invention disclosed herein involves processes and methods for producing viral vector that contacts a target cell to deliver a payload construct, e.g. a recombinant viral construct, which comprises a nucleotide encoding a payload molecule.

[0282] In one embodiment, the process comprises production of viral vector in a viral replication cell using a viral expression construct and a payload construct vector as depicted in FIG. 3. Briefly, the viral expression construct and the payload construct vector of the invention are co-transfected into a viral replication cell by standard molecular biology techniques known and performed by a person skilled in the art. The viral replication cell provides the cellular machinery necessary for expression of Cap proteins that assemble to form a capsid that encloses the payload construct replicated by the Rep proteins. The resultant viral vector is extracted from the viral replication cells and purified into a preparation for administration. The viral vector contacts a target cell and enters the cell in an endosome. The viral vector releases from the endosome and subsequently contacts the nucleus of the target cell to deliver the payload construct. The payload construct, e.g. recombinant viral construct, is delivered to the nucleus of the target cell wherein the payload molecule encoded by the payload construct may be expressed.

### Viral Expression Construct

[0283] The viral production system of the invention uses co-infection of a viral replication cell with two constructs. The viral expression construct contains parvoviral genes, rep and cap, under control of one or more promoters including, but not limited to, baculovirus major late promoters, insect virus promoters, non-insect virus promoters, vertebrate virus promoters, nuclear gene promoters, chimeric promoters from one or more species including virus and non-virus elements, and/or synthetic promoters.

[0284] The viral production system of the invention is not limited by the viral expression vector used to introduce the parvoviral functions into the virus replication cell. The presence of the viral expression construct in the virus replication cell need not be permanent. The viral expression constructs can be introduced by any means known, for example by chemical treatment of the cells, electroporation, or infection.

[0285] Viral expression constructs of the invention may include any compound or formulation, biological or chemical, which facilitates transformation, transfection, or transduction of a cell with a nucleic acid. Exemplary biological viral expression constructs include plasmids, linear nucleic acid molecules, and recombinant viruses including baculovirus. Exemplary chemical vectors include lipid complexes. Viral expression constructs are used to incorporate nucleic acid sequences into virus replication cells in accordance with the present invention. (O'Reilly, David R., Lois K. Miller, and Verne A. Luckow. Baculovirus expression vectors: a laboratory manual. Oxford University Press, 1994.); Maniatis et al., eds. Molecular Cloning. CSH Laboratory, NY, N.Y. (1982); and, Philiport and Scluber, eds. Liposoes as tools in Basic Research and Industry. CRC Press, Ann Arbor, Mich. (1995), the contents of each of which are herein incorporated by reference in its entirety.

[0286] The invention disclosed herein is not limited by the number of viral expression constructs employed to produce viral vector. In one embodiment, one, two, three, four, five, six, or more viral expression constructs can be employed to produce viral vector in viral replication cells in accordance with the present invention. In one non-limiting example, six expression vectors may individually encode AAV VP1, AAV VP2, AAV VP3, Rep52, Rep78, and a final transgene vector comprising a polynucleotide and at least one AAV ITR. In another embodiment, expression vectors may be employed to express, for example, Rep52 and Rep40, or Rep78 and Rep 68. Expression vectors may comprise any combination of the at least one AAV ITR and the VP1, VP2, VP3, Rep52/Rep40, and Rep78/Rep68 coding sequences.

[0287] In some embodiments the viral expression vector encodes elements to optimize expression in certain cell types. In a further embodiment, the payload construct vector may comprise polh and/or ΔIE-1 insect transcriptional promoters, CMV mammalian transcriptional promoter, and/or p10 insect specific promoters for expression of a desired gene in a mammalian or insect cell.

[0288] In one embodiment of the invention, a viral expression construct may be used for the production of a viral vector in insect cells. In some embodiments, modifications may be made to the wild type AAV sequences of the capsid and/or rep genes, for example to improve attributes of the viral particle, such as increased infectivity or specificity, or to enhance production yields.

[0289] In one embodiment, the viral expression construct may contain a nucleotide sequence encoding the AAV capsid proteins where the initiation codon of the AAV VP1 capsid protein is a non-ATG, i.e., a suboptimal initiation codon, allowing the expression of a modified ratio of the viral capsid proteins in the insect cell production system, to provide improved infectivity of the host cell. In a non-limiting example, a viral expression construct of the invention may contain a nucleic acid construct comprising a nucleotide sequence encoding AAV VP1, VP2, and VP3 capsid proteins, wherein the initiation codon for translation of the AAV VP1 capsid protein is CTG, TTG, or GTG, as described in U.S. Pat. No. 8,163,543, the contents of which are herein incorporated by reference in its entirety.

[0290] In one embodiment, the viral expression construct of the invention may be a baculoviral construct that encodes the parvoviral rep proteins for expression in insect cells. In one embodiment, a single coding sequence is used for the Rep78 and Rep52 proteins, wherein initiation codon for translation of the Rep78 protein is a suboptimal initiation codon, selected from the group consisting of ACG, TTG, CTG and GTG, that effects partial exon skipping upon expression in insect cells, as described in U.S. Pat. No. 8,512,981, the contents of which is herein incorporated by reference in its entirety, for example to promote less abundant expression of Rep78 as compared to Rep52, which may in that it promotes high vector yields.

[0291] In one embodiment, the viral expression construct may be a baculoviral construct for the expression in insect cells that contains repeating codons with differential codon biases, for example to achieve improved ratios of Rep proteins, eg. Rep78 and Rep52 thereby improving large scale (commercial) production of viral expression construct and/or payload construct vectors in insect cells, as taught in U.S. Pat. No. 8,697,417, the contents of which is herein incorporated by reference in its entirety.

[0292] In another embodiment, improved ratios of rep proteins may be achieved using the method and constructs described in U.S. Pat. No. 8,642,314, the contents of which is herein incorporated by reference in its entirety.

[0293] In one embodiment, the viral expression construct may encode mutant parvoviral Rep polypeptides which have one or more improved properties as compared with their corresponding wild type Rep polypeptide. For example, the make enable the preparation of higher virus titers, for large scale production, than a corresponding wild type Rep polypeptide. Alternatively, they may be able to allow the production of better quality viral particles or sustain more stable production of virus. In a non-limiting example, the viral expression construct may encode mutant Rep polypeptides with a mutated nuclear localization sequence or zinc finger domain, as described in Patent Application US 20130023034, the contents of which is herein incorporated by reference in its entirety.

[0294] In one embodiment, the viral expression construct may encode the components of a Parvoviral capsid with incorporated Gly-Ala repeat region, which may function as an immune invasion sequence, as described in US Patent Application 20110171262, the contents of which are herein incorporated by reference in its entirety.

[0295] In one embodiment, a viral expression construct of the invention may be derived from the AAV4 serotype and allow packaging of the transgene construct in an AAV4 capsid, for example for delivery to an ependymal cell, as described in U.S. Pat. No. 6,468,524, the contents of which are herein incorporated by reference in its entirety.

[0296] In one embodiment, a viral expression construct may be derived from the AAV5 serotype and allow packaging of the transgene construct in a AAV5 capsid, for example for delivery to neuronal and/or alveolar cells, as described in U.S. Pat. Nos. 6,984,517, 7,479,554, and, and 6,855,314, the contents of each of which are herein incorporated by reference in their entirety.

[0297] In one embodiment of the invention, a viral expression construct may be used for the production of a viral vector in insect cells. In some embodiments, modifications may be made to the wild type AAV sequences of the capsid and/or rep genes, for example to improve attributes of the viral particle, such as increased infectivity or specificity, or to enhance production yields.

[0298] In some embodiments, viral expression constructs may be used that are taught in U.S. Pat. No. 8,512,981, U.S. Pat. No. 8,163,543, U.S. Pat. No. 8,697,417, U.S. Pat. No. 8,642,314, US Patent Publication Nos. US20130296532, US20110119777, US20110136227, US20110171262, US20130023034, International Patent Application Nos. PCT/NL2008/050613, PCT/NL2009/050076, PCT/NL2009/050352, PCT/NL2011/050170, PCT/NL2012/050619 and U.S. patent application Ser. No. 14/149,953, the contents of each of which are herein incorporated by reference in their entirety.

[0299] In some embodiments, the viral expression construct of the invention may be derived from viral expression constructs taught in U.S. Pat. No. 6,468,524, U.S. Pat. No. 6,984,517, U.S. Pat. No. 7,479,554, U.S. Pat. No. 6,855,314, U.S. Pat. No. 7,271,002, U.S. Pat. No. 6,723,551, US Patent Publication No. 20140107186, U.S. patent application Ser. No. 09/717,789, U.S. Ser. No. 11/936,394, U.S. Ser. No. 14/004,379, European Patent Application EP1082413, EP2500434, EP 2683829, EP1572893 and International Patent Application PCT/US99/11958, PCT/US01/09123, PCT/EP2012/054303, and PCT/US2002/035829 the contents of each of which are herein incorporated by reference in its entirety.

[0300] In some embodiments, the viral expression construct may include sequences from Simian species. In some embodiments, the viral expression construct may contain sequences, including but not limited to capsid and rep sequences from International Patent Applications PCT/US1997/015694, PCT/US2000/033256, PCT/US2002/019735, PCT/US2002/033645, PCT/US2008/013067, PCT/US2008/013066, PCT/US2008/013065, PCT/US2009/062548, PCT/US2009/001344, PCT/US2010/036332, PCT/US2011/061632, PCT/US2013/041565, U.S. application Ser. No. 13/475,535, U.S. Ser. No. 13/896,722, U.S. Ser. No. 10/739,096, U.S. Ser. No. 14/073,979, US Patent Publication Nos. US20010049144, US20120093853, US20090215871, US20040136963, US20080219954, US20040171807, US20120093778, US20080090281, US20050069866, US20100260799, US20100247490, US20140044680, US20100254947, US20110223135, US20130309205, US20120189582, US20130004461, US20130315871, U.S. Pat. No. 6,083,716, U.S. Pat. No. 7,838,277, U.S. Pat. No. 7,344,872, U.S. Pat. No. 8,603,459, U.S. Pat. No. 8,105,574, U.S. Pat. No. 7,247,472, U.S. Pat. No. 8,231,880, U.S. Pat. No. 8,524,219, U.S. Pat. No. 8,470,310, European Patent Application Nos. EP2301582, EP2286841, EP1944043, EP1453543, EP1409748, EP2463362, EP2220217, EP2220241, EP2220242, EP2350269, EP2250255, EP2435559, EP2643465, EP1409748, EP2325298, EP1240345, the contents of each of which is herein incorporated by reference in its entirety.

[0301] In some embodiments, viral expression constructs of the invention may include one or more nucleotide sequence from one or more viral construct described in in International Application No. PCT/US2002/025096, PCT/US2002/033629, PCT/US2003/012405, U.S. application Ser. No. 10/291,583, U.S. Ser. No. 10/420,284, U.S. Pat. No. 7,319,002, US Patent Publication No. US20040191762, US20130045186, US20110263027, US20110151434, US20030138772, US20030207259, European Application No. EP2338900, EP1456419, EP1310571, EP1359217, EP1427835, EP2338900, EP1456419, EP1310571, EP1359217 and U.S. Pat. No. 7,235,393 and U.S. Pat. No. 8,524,446.

[0302] In some embodiments, the viral expression constructs of the invention may comprise sequences or compositions described in International Patent Application No. PCT/US1999/025694, PCT/US1999/010096, PCT/US2001/013000, PCT/US2002/25976, PCT/US2002/033631, PCT/US2002/033630, PCT/US2009/041606, PCT/US2012/025550, U.S. Pat. No. 8,637,255, U.S. Pat. No. 8,637,255, U.S. Pat. No. 7,186,552, U.S. Pat. No. 7,105,345, U.S. Pat. No. 6,759,237, U.S. Pat. No. 7,056,502, U.S. Pat. No. 7,198,951, U.S. Pat. No. 8,318,480, U.S. Pat. No. 7,790,449, U.S. Pat. No. 7,282,199, US Patent Publication No. US20130059289, US20040057933, US20040057932, US20100278791, US20080050345, US20080050343, US20080008684, US20060204479, US20040057931, US20040052764, US20030013189, US20090227030, US20080075740, US20080075737, US20030228282, US20130323226, US20050014262, US patent application Ser. No. 14/136,331, U.S. Ser. No. 09/076,369, U.S. Ser. No. 10/738,609, European Application No. EP2573170, EP1127150, EP2341068, EP1845163, EP1127150, EP1078096, EP1285078, EP1463805, EP2010178940, US20140004143, EP2359869, EP1453547, EP2341068, and EP2675902, the contents of each of which are herein incorporated by reference in their entirety.

[0303] In some embodiments, viral expression construct of the invention may include one or more nucleotide sequence from one or more of those described in U.S. Pat. No. 7,186,552, U.S. Pat. No. 7,105,345, U.S. Pat. No. 6,759,237, U.S. Pat. No. 7,056,502, U.S. Pat. No. 7,198,951, U.S. Pat. No. 8,318,480, U.S. Pat. No. 7,790,449, U.S. Pat. No. 7,282,199, US Patent Publication No. US20130059289, US20040057933, US20040057932, US20100278791, US20080050345, US20080050343, US20080008684, US20060204479, US20040057931, US20140004143, US20090227030, US20080075740, US20080075737, US20030228282, US20040052764, US20030013189, US20050014262, US20130323226, US patent application Ser. No. 14/136,331, U.S. Ser. No. 10/738,609, European Patent Application Nos. EP1127150, EP2341068, EP1845163, EP1127150, EP1078096, EP1285078, EP2573170, EP1463805, EP2675902, EP2359869, EP1453547, EP2341068, the contents of each of which are incorporated herein by reference in their entirety.

[0304] In some embodiments, the viral expression constructs of the invention may include constructs of modified AAVs, as described in International Patent Application No. PCT/US1995/014018, PCT/US2000/026449, PCT/US2004/028817, PCT/US2006/013375, PCT/US2007/010056, PCT/US2010/032158, PCT/US2010/050135, PCT/US2011/033596, U.S. patent application Ser. No. 12/473,917, U.S. Ser. No. 08/331,384, U.S. Ser. No. 09/670,277, U.S. Pat. No. 5,871,982, U.S. Pat. No. 5,856,152, U.S. Pat. No. 6,251,677, U.S. Pat. No. 6,387,368, U.S. Pat. No. 6,399,385, U.S. Pat. No. 7,906,111, European Patent Application No. EP2000103600, European Patent Publication No. EP797678, EP1046711, EP1668143, EP2359866, EP2359865, EP2357010, EP1046711, EP1218035, EP2345731, EP2298926, EP2292780, EP2292779, EP1668143, US20090197338, EP2383346, EP2359867, EP2359866, EP2359865, EP2357010, EP1866422, US20090317417, EP2016174, US Patent Publication Nos. US20110236353, US20070036760, US20100186103, US20120137379, and US20130281516, the contents of each of which are herein incorporated by reference in their entirety.

[0305] In some embodiments, the viral expression constructs of the invention may include one or more constructs described in International Application Nos. PCT/US1999/004367, PCT/US2004/010965, PCT/US2005/014556, PCT/US2006/009699, PCT/US2010/032943, PCT/US2011/033628, PCT/US2011/033616, PCT/US2012/034355, U.S. Pat. No. 8,394,386, EP1742668, US Patent Publication Nos. US20080241189, US20120046349, US20130195801, US20140031418, EP2425000, US20130101558, EP1742668, EP2561075, EP2561073, EP2699688, the contents of each of which is herein incorporated by reference in its entirety.

### Payload Construct Vector

[0306] The viral production system of the invention uses co-infection of a viral replication cell with two constructs. The payload construct vector encodes the payload construct that will be replicated in the viral replication cell, packaged within the viral capsid, and subsequently delivered to the nucleus of the target cell. The payload construct is a viral expression construct and/or payload construct vector that comprises two ITR sequences that flank a polynucleotide sequence under control of one or more promoters including, but not limited to, baculovirus major late promoters, insect virus promoters, non-insect virus promoters, vertebrate virus promoters, nuclear gene promoters, chimeric promoters from one or more species including virus and non-virus elements, and/or synthetic promoters.

[0307] In some embodiments the payload construct vector encodes elements to optimize expression in certain cell types. In a further embodiment, the payload construct vector may comprise polh and/or ALE-1 insect transcriptional promoters, CMV mammalian transcriptional promoter, and/or p10 insect specific promoters for expression of a desired gene in a mammalian or insect cell.

[0308] In one embodiment, the payload construct vector may be used in combination with a viral expression construct, such as a baculoviral construct for expression in insect cells, which comprises a nucleotide sequence encoding at least one parvoviral Rep protein; whose expression is driven by a promoter, and does not comprise a parvoviral Cap protein or a nucleotide sequence encoding a parvoviral Cap protein, as described in US Patent Publication No. 20110119777 the contents of which is herein incorporated by reference in its entirety. This expression system may be useful for large scale production of gene products, including but not limited to the payload and viral rep proteins.

[0309] In some embodiments, the payload construct vector of the invention may be derived from viral expression constructs taught in U.S. Pat. No. 6,468,524, U.S. Pat. No. 6,984,517, U.S. Pat. No. 7,479,554, U.S. Pat. No. 6,855,314, U.S. Pat. No. 7,271,002, U.S. Pat. No. 6,723,551, US Patent Publication No. 20140107186, U.S. patent application Ser. No. 09/717,789, U.S. Ser. No. 11/936,394, U.S. Ser. No. 14/004,379, European Patent Application EP1082413, EP2500434, EP 2683829, EP1572893 and International Patent Application PCT/US99/11958, PCT/US01/09123, PCT/EP2012/054303, and PCT/US2002/035829 the contents of each of which are herein incorporated by reference in its entirety.

[0310] In some embodiments, the viral expression construct may include sequences from Simian species. In some embodiments, the viral expression construct may contain sequences, including but not limited to capsid and rep sequences from International Patent Publications PCT/US1997/015694, PCT/US2000/033256, PCT/US2002/019735, PCT/US2002/033645, PCT/US2008/013067, PCT/US2008/013066, PCT/US2008/013065, PCT/US2009/062548, PCT/US2009/001344, PCT/US2010/036332, PCT/US2011/061632, PCT/US2013/041565, U.S. application Ser. No. 13/475,535, U.S. Ser. No. 13/896,722, U.S. Ser. No. 10/739,096, U.S. Ser. No. 14/073,979, US Patent Publication Nos. US20010049144, US20120093853, US20090215871, US20040136963, US20080219954, US20040171807, US20120093778, US20080090281, US20050069866, US20100260799, US20100247490, US20140044680, US20100254947, US20110223135, US20130309205, US20120189582, US20130004461, US20130315871, U.S. Pat. No. 6,083,716, U.S. Pat. No. 7,838,277, U.S. Pat. No. 7,344,872, U.S. Pat. No. 8,603,459, U.S. Pat. No. 8,105,574, U.S. Pat. No. 7,247,472, U.S. Pat. No. 8,231,880, U.S. Pat. No. 8,524,219, U.S. Pat. No. 8,470,310, European Patent Application Nos. EP2301582, EP2286841, EP1944043, EP1453543, EP1409748, EP2463362, EP2220217, EP2220241, EP2220242, EP2350269, EP2250255, EP2435559, EP2643465, EP1409748, EP2325298, EP1240345, the contents of each of which is herein incorporated by reference in its entirety.

[0311] In some embodiments, the payload construct vector, payload construct, payload, and/or viral expression construct and/or payload construct vector may contain sequences from International Patent Application Nos. PCT/US1996/003041, PCT/US1997/015692, PCT/US1998/019470, U.S. patent application Ser. No. 08/393,734, U.S. Ser. No. 08/729,061, U.S. Ser. No. 08/708,188, U.S. Pat. No. 7,306,794, U.S. Pat. No. 6,887,463, U.S. Pat. No. 6,174,527, U.S. Pat. No. 5,652,224 (Assigned to NIH), U.S. Pat. No. 5,866,552, US Patent Publication Nos. US20050112103, US20020182182, US20020131961, US20020037867, US20010006955, European Patent Application Nos. EP811074, EP932418, EP1696036, EP811074, EP932418, EP1696036, the contents of each of which are herein incorporated by reference in its entirety.

[0312] In some embodiments, payload construct vectors of the invention may include one or more nucleotide sequence from one or more viral construct described in in International Application No. PCT/US2002/025096, PCT/US2002/033629, PCT/US2003/012405, U.S. application Ser. No. 10/291,583, U.S. Ser. No. 10/420,284, U.S. Pat. No. 7,319,002, US Patent Publication No. US20040191762, US20130045186, US20110263027, US20110151434, US20030138772, US20030207259, European Application No. EP2338900, EP1456419, EP1310571, EP1359217, EP1427835, EP2338900, EP1456419, EP1310571, EP1359217 and U.S. Pat. No. 7,235,393 and U.S. Pat. No. 8,524,446.

[0313] In some embodiments, the payload construct vectors of the invention may comprise sequences or compositions described in International Patent Application No. PCT/US1999/025694, PCT/US1999/010096, PCT/US2001/013000, PCT/US2002/25976, PCT/US2002/033631, PCT/US2002/033630, PCT/US2009/041606, PCT/US2012/025550, U.S. Pat. No. 8,637,255, U.S. Pat. No. 8,637,255, U.S. Pat. No. 7,186,552, U.S. Pat. No. 7,105,345, U.S. Pat. No. 6,759,237, U.S. Pat. No. 7,056,502, U.S. Pat. No. 7,198,951, U.S. Pat. No. 8,318,480, U.S. Pat. No. 7,790,449, U.S. Pat. No. 7,282,199, US Patent Publication No. US20130059289, US20040057933, US20040057932, US20100278791, US20080050345, US20080050343, US20080008684, US20060204479, US20040057931, US20040052764, US20030013189, US20090227030, US20080075740, US20080075737, US20030228282, US20130323226, US20050014262, U.S. patent application Ser. No. 14/136,331, U.S. Ser. No. 09/076,369, U.S. Ser. No. 10/738,609, European Application No. EP2573170, EP1127150, EP2341068, EP1845163, EP1127150, EP1078096, EP1285078, EP1463805, EP2010178940, US20140004143, EP2359869, EP1453547, EP2341068, and EP2675902, the contents of each of which are herein incorporated by reference in their entirety.

[0314] In some embodiments, the payload construct vector may include sequences from Simian species. In some embodiments, the viral expression construct may contain sequences, including but not limited to capsid and rep sequences from International Patent Applications PCT/US1997/015694, PCT/US2000/033256, PCT/US2002/019735, PCT/US2002/033645, PCT/US2008/013067, PCT/US2008/013066, PCT/US2008/013065, PCT/US2009/062548, PCT/US2009/001344, PCT/US2010/036332, PCT/US2011/061632, PCT/US2013/041565, U.S. application Ser. No. 13/475,535, U.S. Ser. No. 13/896,722, U.S. Ser. No. 10/739,096, U.S. Ser. No. 14/073,979, US Patent Publication Nos. US20010049144, US20120093853, US20090215871, US20040136963, US20080219954, US20040171807, US20120093778, US20080090281, US20050069866, US20100260799, US20100247490, US20140044680, US20100254947, US20110223135, US20130309205, US20120189582, US20130004461, US20130315871, U.S. Pat. No. 6,083,716, U.S. Pat. No. 7,838,277, U.S. Pat. No. 7,344,872, U.S. Pat. No. 8,603,459, U.S. Pat. No. 8,105,574, U.S. Pat. No. 7,247,472, U.S. Pat. No. 8,231,880, U.S. Pat. No. 8,524,219, U.S. Pat. No. 8,470,310, European Patent Application Nos. EP2301582, EP2286841, EP1944043, EP1453543, EP1409748, EP2463362, EP2220217, EP2220241, EP2220242, EP2350269, EP2250255, EP2435559, EP2643465, EP1409748, EP2325298, EP1240345, the contents of each of which is herein incorporated by reference in its entirety.

[0315] In some embodiments, the payload construct vector of the invention may include one or more nucleotide sequence from one or more of those described in U.S. Pat. No. 7,186,552, U.S. Pat. No. 7,105,345, U.S. Pat. No. 6,759,237, U.S. Pat. No. 7,056,502, U.S. Pat. No. 7,198,951, U.S. Pat. No. 8,318,480, U.S. Pat. No. 7,790,449, U.S. Pat. No. 7,282,199, US Patent Publication No. US20130059289, US20040057933, US20040057932, US20100278791, US20080050345, US20080050343, US20080008684, US20060204479, US20040057931, US20140004143, US20090227030, US20080075740, US20080075737, US20030228282, US20040052764, US20030013189, US20050014262, US20130323226, U.S. patent application Ser. No. 14/136,331, U.S. Ser. No. 10/738,609, European Patent Application Nos. EP1127150, EP2341068, EP1845163, EP1127150, EP1078096, EP1285078, EP2573170, EP1463805, EP2675902, EP2359869, EP1453547, EP2341068, the contents of each of which are incorporated herein by reference in their entirety.

[0316] In some embodiments, the payload construct vectors of the invention may include one or more inducible and regulatable constructs, as described in International Patent Application Nos. PCT/US2011/030213, PCT/US2012/057803, PCT/US2002/000961, US Patent Publication Nos. US20130023033, US20120058102 and European Patent Application No. EP2553106, the contents of each of which are incorporated herein by reference in their entirety.

[0317] In some embodiments, the payload construct vector of the invention may include constructs of modified AAVs, as described in International Patent Application No. PCT/US1995/014018, PCT/US2000/026449, PCT/US2004/028817, PCT/US2006/013375, PCT/US2007/010056, PCT/US2010/032158, PCT/US2010/050135, PCT/US2011/033596, U.S. patent application Ser. No. 12/473,917, U.S. Ser. No. 08/331,384, U.S. Ser. No. 09/670,277, U.S. Pat. No. 5,871,982, U.S. Pat. No. 5,856,152, U.S. Pat. No. 6,251,677, U.S. Pat. No. 6,387,368, U.S. Pat. No. 6,399,385, U.S. Pat. No. 7,906,111, European Patent Application No. EP2000103600, European Patent Publication No. EP797678, EP1046711, EP1668143, EP2359866, EP2359865, EP2357010, EP1046711, EP1218035, EP2345731, EP2298926, EP2292780, EP2292779, EP1668143, US20090197338, EP2383346, EP2359867, EP2359866, EP2359865, EP2357010, EP1866422, US20090317417, EP2016174, US Patent Publication Nos. US20110236353, US20070036760, US20100186103, US20120137379, and US20130281516, the contents of each of which are herein incorporated by reference in their entirety.

[0318] In some embodiments, the payload construct vector of the invention may include one or more constructs described in International Application Nos. PCT/US1999/004367, PCT/US2004/010965, PCT/US2005/014556, PCT/US2006/009699, PCT/US2010/032943, PCT/US2011/033628, PCT/US2011/033616, PCT/US2012/034355, U.S. Pat. No. 8,394,386, EP1742668, US Patent Publication Nos. US20080241189, US20120046349, US20130195801, US20140031418, EP2425000, US20130101558, EP1742668, EP2561075, EP2561073, EP2699688, the contents of each of which is herein incorporated by reference in its entirety.

[0319] The payload construct vector may have flanking ITRs from different serotypes. In one embodiment, transgene construct of the invention may contain AAV4 ITRs, as described in U.S. Pat. No. 6,468,524 (inventors Chiorini and Kotin), the contents of which is herein incorporated by reference in its entirety, which can for example be used to deliver a the nucleic acid of interest to the ependymal cell.

[0320] In one embodiment, the payload construct vector comprises AAV5 ITRs, as described in U.S. Pat. Nos. 6,984,517 and 7,479,554. In one embodiment, the construct may comprise AAV5 ITRs, as described in U.S. Pat. Nos. 6,984,517, 7,479,554, and 6,855,314, the contents of each of which are herein incorporated by reference in their entirety.

[0321] In one embodiment, the payload construct vector of the invention may encode closed-ended, linear duplex molecules that can be amplified from the vector. In a non-limiting example, these closed-ended, linear duplex molecules may be CELiD DNA, as described in Lina Li, Emilios K. Dimitriadis, Yu Yang, Juan Li, Zhenhua Yuan, Chunping Qiao, Cyriaque Beley, Richard H. Smith, Luis Garcia, Robert M. Kotin: Production and Characterization of Novel Recombinant Adeno-Associated Virus Replicative-Form Genomes: A Eukaryotic Source of DNA for Gene Transfer PLOS ONE 8 (8): e69879, the contents of which is herein incorporated by reference in its entirety.

### CELiD

[0322] CELiD DNA comprises at least one transgene and at least one promoter to drive the expression of the transgene and contains inverted terminal repeats (ITRs) from the adeno-associated virus type 2 (AAV) on each end. Without wishing to be bound by theory, the covalent closure at each end of the linear construct protects against degradation, and confers stability to the CELiD DNA, which otherwise as a linear DNA duplex molecule may be susceptible to exonuclease activity.

[0323] CELiD DNA may be amplified to high copy number in insect cells, such as Spodoptera frugiperda (Sf9) cells, in the presence of a viral expression construct containing proteins Rep78 and Rep52, as described in Lina Li, Emilios K. Dimitriadis, Yu Yang, Juan Li, Zhenhua Yuan, Chunping Qiao, Cyriaque Beley, Richard H. Smith, Luis Garcia, Robert M. Kotin: Production and Characterization of Novel Recombinant Adeno-Associated Virus Replicative-Form Genomes: A Eukaryotic Source of DNA for Gene Transfer PLOS ONE 8 (8): e69879, the contents of which is herein incorporated by reference in its entirety. In one embodiment, a second baculoviral contruct encoding the AAV replication proteins may be used in combination with the baculoviral construct encoding the CELiD. In another embodiment, the CeLID DNA may be amplified using a 519 cell line that bears a stably integrated rAAV vector genome.

### Other Expression Constructs

[0324] In some embodiments, the viral expression construct may include sequences from Simian species. In some embodiments, the viral expression construct may contain sequences, including but not limited to capsid and rep sequences from International Patent Applications PCT/US1997/015694, PCT/US2000/033256, PCT/US2002/019735, PCT/US2002/033645, PCT/US2008/013067, PCT/US2008/013066, PCT/US2008/013065, PCT/US2009/062548, PCT/US2009/001344, PCT/US2010/036332, PCT/US2011/061632, PCT/US2013/041565, U.S. application Ser. No. 13/475,535, U.S. Ser. No. 13/896,722, U.S. Ser. No. 10/739,096, U.S. Ser. No. 14/073,979, US Patent Publication Nos. US20010049144, US20120093853, US20090215871, US20040136963, US20080219954, US20040171807, US20120093778, US20080090281, US20050069866, US20100260799, US20100247490, US20140044680, US20100254947, US20110223135, US20130309205, US20120189582, US20130004461, US20130315871, U.S. Pat. No. 6,083,716, U.S. Pat. No. 7,838,277, U.S. Pat. No. 7,344,872, U.S. Pat. No. 8,603,459, U.S. Pat. No. 8,105,574, U.S. Pat. No. 7,247,472, U.S. Pat. No. 8,231,880, U.S. Pat. No. 8,524,219, U.S. Pat. No. 8,470,310, European Patent Application Nos. EP2301582, EP2286841, EP1944043, EP1453543, EP1409748, EP2463362, EP2220217, EP2220241, EP2220242, EP2350269, EP2250255, EP2435559, EP2643465, EP1409748, EP2325298, EP1240345, the contents of each of which is herein incorporated by reference in its entirety.

[0325] In some embodiments, viral expression construct and/or payload construct vectors of the invention may include one or more nucleotide sequence from one or more of those described in in International Application No. PCT/US2002/025096, PCT/US2002/033629, PCT/US2003/012405, U.S. application Ser. No. 10/291,583, U.S. Ser. No. 10/420,284, U.S. Pat. No. 7,319,002, US Patent Publication No. US20040191762, US20130045186, US20110263027, US20110151434, US20030138772, US20030207259, European Application No. EP2338900, EP1456419, EP1310571, EP1359217, EP1427835, EP2338900, EP1456419, EP1310571, EP1359217 and U.S. Pat. No. 7,235,393 and U.S. Pat. No. 8,524,446.

[0326] In some embodiments, the constructs of the invention may comprise sequences or compositions described in International Patent Application No. PCT/US1999/025694, PCT/US1999/010096, PCT/US2001/013000, PCT/US2002/25976, PCT/US2002/033631, PCT/US2002/033630, PCT/US2009/041606, PCT/US2012/025550, U.S. Pat. No. 8,637,255, U.S. Pat. No. 8,637,255, U.S. Pat. No. 7,186,552, U.S. Pat. No. 7,105,345, U.S. Pat. No. 6,759,237, U.S. Pat. No. 7,056,502, U.S. Pat. No. 7,198,951, U.S. Pat. No. 8,318,480, U.S. Pat. No. 7,790,449, U.S. Pat. No. 7,282,199, US Patent Publication No. US20130059289, US20040057933, US20040057932, US20100278791, US20080050345, US20080050343, US20080008684, US20060204479, US20040057931, US20040052764, US20030013189, US20090227030, US20080075740, US20080075737, US20030228282, US20130323226, US20050014262, U.S. patent application Ser. No. 14/136,331, U.S. Ser. No. 09/076,369, U.S. Ser. No. 10/738,609, European Application No. EP2573170, EP1127150, EP2341068, EP1845163, EP1127150, EP1078096, EP1285078, EP1463805, EP2010178940, US20140004143, EP2359869, EP1453547, EP2341068, and EP2675902, the contents of each of which are herein incorporated by reference in their entirety.

[0327] In some embodiments, the viral expression construct and/or payload construct vector of the invention may include one or more nucleotide sequence from one or more of those described in U.S. Pat. No. 7,186,552, U.S. Pat. No. 7,105,345, U.S. Pat. No. 6,759,237, U.S. Pat. No. 7,056,502, U.S. Pat. No. 7,198,951, U.S. Pat. No. 8,318,480, U.S. Pat. No. 7,790,449, U.S. Pat. No. 7,282,199, US Patent Publication No. US20130059289, US20040057933, US20040057932, US20100278791, US20080050345, US20080050343, US20080008684, US20060204479, US20040057931, US20140004143, US20090227030, US20080075740, US20080075737, US20030228282, US20040052764, US20030013189, US20050014262, US20130323226, U.S. patent application Ser. No. 14/136,331, U.S. Ser. No. 10/738,609, European Patent Application Nos. EP1127150, EP2341068, EP1845163, EP1127150, EP1078096, EP1285078, EP2573170, EP1463805, EP2675902, EP2359869, EP1453547, EP2341068, the contents of each of which are incorporated herein by reference in their entirety.

[0328] In some embodiments, the viral expression construct and/or payload construct vector of the invention may include one or more inducible and regulatable constructs, as described in International Patent Application Nos. PCT/US2011/030213, PCT/US2012/057803, PCT/US2002/000961, US Patent Publication Nos. US20130023033, US20120058102 and European Patent Application No. EP2553106, the contents of each of which are incorporated herein by reference in their entirety.

[0329] In some embodiments, the viral expression construct and/or payload construct vector of the invention may include constructs of modified AAVs, as described in International Patent Application No. PCT/US1995/014018, PCT/US2000/026449, PCT/US2004/028817, PCT/US2006/013375, PCT/US2007/010056, PCT/US2010/032158, PCT/US2010/050135, PCT/US2011/033596, U.S. patent application Ser. No. 12/473,917, U.S. Ser. No. 08/331,384, U.S. Ser. No. 09/670,277, U.S. Pat. No. 5,871,982, U.S. Pat. No. 5,856,152, U.S. Pat. No. 6,251,677, U.S. Pat. No. 6,387,368, U.S. Pat. No. 6,399,385, U.S. Pat. No. 7,906,111, European Patent Application No. EP2000103600, European Patent Publication No. EP797678, EP1046711, EP1668143, EP2359866, EP2359865, EP2357010, EP1046711, EP1218035, EP2345731, EP2298926, EP2292780, EP2292779, EP1668143, US20090197338, EP2383346, EP2359867, EP2359866, EP2359865, EP2357010, EP1866422, US20090317417, EP2016174, US Patent Publication Nos. US20110236353, US20070036760, US20100186103, US20120137379, and US20130281516, the contents of each of which are herein incorporated by reference in their entirety.

[0330] In some embodiments, the viral expression construct and/or payload construct vector of the invention may include one or more constructs described in International Application Nos. PCT/US1999/004367, PCT/US2004/010965, PCT/US2005/014556, PCT/US2006/009699, PCT/US2010/032943, PCT/US2011/033628, PCT/US2011/033616, PCT/US2012/034355, U.S. Pat. No. 8,394,386, EP1742668, US Patent Publication Nos. US20080241189, US20120046349, US20130195801, US20140031418, EP2425000, US20130101558, EP1742668, EP2561075, EP2561073, EP2699688, the contents of each of which is herein incorporated by reference in its entirety.

### Control Mechanisms

[0331] Structural VP proteins, VP1, VP2, and VP3, and non-structural proteins, Rep 52 and Rep78, of the viral expression construct are encoded in a single open reading frame regulated by utilization of both alternative splice acceptor and non-canonical translational initiation codons. Both Rep 78 and Rep 52 are translated from a single transcript: Rep 78 translation initiates at a non-AUG codon and Rep 52 translation initiates at the first AUG in the transcript. VP1, VP2 and VP3 are translated from a single transcript wherein both in-frame and out-of-frame ATG triplets preventing translation initiation at a position between the VP1 and VP2 start codons are eliminated.

[0332] The VP and Rep coding nucleotide sequences are operably linked to at least one expression control sequence for expression in a viral producing cell. Herein, “coding nucleotide sequences” refer to that portion of a nucleotide sequence that is translated into a protein product. “Operably linked” means that the expression control sequence is positioned relative to the coding sequence such that it can promote the expression of the encoded gene product.

[0333] “Expression control sequence” refers to a nucleic acid sequence that regulates the expression of a nucleotide sequence to which it is operably linked. An expression control sequence is “operably linked” to a nucleotide sequence when the expression control sequence controls and regulates the transcription and/or the translation of the nucleotide sequence. Thus, an expression control sequence can include promoters, enhancers, internal ribosome entry sites (IRES), transcription terminators, a start codon in front of a protein-encoding gene, splicing signal for introns, and stop codons. The term “expression control sequence” is intended to include, at a minimum, a sequence whose presence are designed to influence expression, and can also include additional advantageous components. For example, leader sequences and fusion partner sequences are expression control sequences. The term can also include the design of the nucleic acid sequence such that undesirable, potential initiation codons in and out of frame, are removed from the sequence. It can also include the design of the nucleic acid sequence such that undesirable potential splice sites are removed. It includes sequences or polyadenylation sequences (pA) which direct the addition of a polyA tail, i.e., a string of adenine residues at the 3′-end of an mRNA, sequences referred to as polyA sequences. It also can be designed to enhance mRNA stability. Expression control sequences which affect the transcription and translation stability, e.g., promoters, as well as sequences which effect the translation, e.g., Kozak sequences, are known in insect cells. Expression control sequences can be of such nature as to modulate the nucleotide sequence to which it is operably linked such that lower expression levels or higher expression levels are achieved.

[0334] More than one expression control sequence can be operably linked to a given nucleotide sequence. For example, a promoter sequence, a translation initiation sequence, and a stop codon can be operably linked to a nucleotide sequence.

[0335] The translational start site of eukaryotic mRNA is controlled in part by a nucleotide sequence referred to as a Kozak sequence as described in Kozak, M Cell. 1986 Jan. 31; 44(2):283-92 and Kozak, M. J Cell Biol. 1989 February; 108(2):229-41 the contents of each of which are herein incorporated by reference in their entirety. Both naturally occurring and synthetic translational start sites of the Kozak form can be used in the production of polypeptides by molecular genetic techniques, Kozak, M. Mamm Genome. 1996 August; 7(8):563-74 the contents of which are herein incorporated by reference in their entirety. Splice sites are sequences on an mRNA which facilitate the removal of parts of the mRNA sequences after the transcription (formation) of the mRNA. Typically, the splicing occurs in the nucleus, prior to mRNA transport into a cell's cytoplasm.

[0336] The method of the invention is not limited by the use of specific expression control sequences. However, when a certain stoichiometry of VP products are achieved (close to 1:1:10 for VP1, VP2, and VP3, respectively) and also when the levels of Rep52 or Rep40 (also referred to as the p19 Reps) are significantly higher than Rep78 or Rep68 (also referred to as the p5 Reps), the best yields of AAV in insect cell may be obtained. In one embodiment, the p5/p19 ratio is below 0.6 more preferably below 0.4, more preferably yet, below 0.3, but always at least 0.03. These ratios can be measured at the level of the protein or can be implicated from the relative levels of specific mRNAs.

[0337] In one embodiment of the invention, Rep52 is transcribed from the baculoviral derived polyhedron promoter, (polh). Rep78 is transcribed from a weaker promoter, for example a deletion mutant of the IE-1 promoter, the ΔIE-1 promoter, has about 20% of the transcriptional activity of that IE-1 promoter. A promoter substantially homologous to the ΔIE-1 promoter may be used. In respect to promoters, a homology of at least 50%, 60%, 70%, preferably 80%, more preferably 90% or more, is considered to be a substantially homologous promoter.

### Viral Vectors

[0338] In some embodiments, the viral vector may include sequences from Simian species. In some embodiments, the viral expression construct may contain sequences, including but not limited to capsid and rep sequences from International Patent Applications PCT/US1997/015694, PCT/US2000/033256, PCT/US2002/019735, PCT/US2002/033645, PCT/US2008/013067, PCT/US2008/013066, PCT/US2008/013065, PCT/US2009/062548, PCT/US2009/001344, PCT/US2010/036332, PCT/US2011/061632, PCT/US2013/041565, U.S. application Ser. No. 13/475,535, U.S. Ser. No. 13/896,722, U.S. Ser. No. 10/739,096, U.S. Ser. No. 14/073,979, US Patent Publication Nos. US20010049144, US20120093853, US20090215871, US20040136963, US20080219954, US20040171807, US20120093778, US20080090281, US20050069866, US20100260799, US20100247490, US20140044680, US20100254947, US20110223135, US20130309205, US20120189582, US20130004461, US20130315871, U.S. Pat. No. 6,083,716, U.S. Pat. No. 7,838,277, U.S. Pat. No. 7,344,872, U.S. Pat. No. 8,603,459, U.S. Pat. No. 8,105,574, U.S. Pat. No. 7,247,472, U.S. Pat. No. 8,231,880, U.S. Pat. No. 8,524,219, U.S. Pat. No. 8,470,310, European Patent Application Nos. EP2301582, EP2286841, EP1944043, EP1453543, EP1409748, EP2463362, EP2220217, EP2220241, EP2220242, EP2350269, EP2250255, EP2435559, EP2643465, EP1409748, EP2325298, EP1240345, the contents of each of which is herein incorporated by reference in its entirety.

[0339] In some embodiments, viral vectors of the invention may include one or more nucleotide sequence from one or more of those described in in International Application No. PCT/US2002/025096, PCT/US2002/033629, PCT/US2003/012405, U.S. application Ser. No. 10/291,583, U.S. Ser. No. 10/420,284, U.S. Pat. No. 7,319,002, US Patent Publication No. US20040191762, US20130045186, US20110263027, US20110151434, US20030138772, US20030207259, European Application No. EP2338900, EP1456419, EP1310571, EP1359217, EP1427835, EP2338900, EP1456419, EP1310571, EP1359217 and U.S. Pat. No. 7,235,393 and U.S. Pat. No. 8,524,446.

[0340] In some embodiments, the viral vectors of the invention may comprise sequences or compositions described in International Patent Application No. PCT/US1999/025694, PCT/US1999/010096, PCT/US2001/013000, PCT/US2002/25976, PCT/US2002/033631, PCT/US2002/033630, PCT/US2009/041606, PCT/US2012/025550, U.S. Pat. No. 8,637,255, U.S. Pat. No. 8,637,255, U.S. Pat. No. 7,186,552, U.S. Pat. No. 7,105,345, U.S. Pat. No. 6,759,237, U.S. Pat. No. 7,056,502, U.S. Pat. No. 7,198,951, U.S. Pat. No. 8,318,480, U.S. Pat. No. 7,790,449, U.S. Pat. No. 7,282,199, US Patent Publication No. US20130059289, US20040057933, US20040057932, US20100278791, US20080050345, US20080050343, US20080008684, US20060204479, US20040057931, US20040052764, US20030013189, US20090227030, US20080075740, US20080075737, US20030228282, US20130323226, US20050014262, U.S. patent application Ser. No. 14/136,331, U.S. Ser. No. 09/076,369, U.S. Ser. No. 10/738,609, European Application No. EP2573170, EP1127150, EP2341068, EP1845163, EP1127150, EP1078096, EP1285078, EP1463805, EP2010178940, US20140004143, EP2359869, EP1453547, EP2341068, and EP2675902, the contents of each of which are herein incorporated by reference in their entirety.

[0341] In some embodiments, the viral vector of the invention may include one or more nucleotide sequence from one or more of those described in U.S. Pat. No. 7,186,552, U.S. Pat. No. 7,105,345, U.S. Pat. No. 6,759,237, U.S. Pat. No. 7,056,502, U.S. Pat. No. 7,198,951, U.S. Pat. No. 8,318,480, U.S. Pat. No. 7,790,449, U.S. Pat. No. 7,282,199, US Patent Publication No. US20130059289, US20040057933, US20040057932, US20100278791, US20080050345, US20080050343, US20080008684, US20060204479, US20040057931, US20140004143, US20090227030, US20080075740, US20080075737, US20030228282, US20040052764, US20030013189, US20050014262, US20130323226, U.S. patent application Ser. No. 14/136,331, U.S. Ser. No. 10/738,609, European Patent Application Nos. EP1127150, EP2341068, EP1845163, EP1127150, EP1078096, EP1285078, EP2573170, EP1463805, EP2675902, EP2359869, EP1453547, EP2341068, the contents of each of which are incorporated herein by reference in their entirety.

[0342] In some embodiments, the viral vectors of the invention may include one or more inducible and regulatable constructs, as described in International Patent Application Nos. PCT/US2011/030213, PCT/US2012/057803, PCT/US2002/000961, US Patent Publication Nos. US20130023033, US20120058102 and European Patent Application No. EP2553106, the contents of each of which are incorporated herein by reference in their entirety.

[0343] In some embodiments, the viral vectors of the invention may include constructs of modified AAVs, as described in International Patent Application No. PCT/US1995/014018, PCT/US2000/026449, PCT/US2004/028817, PCT/US2006/013375, PCT/US2007/010056, PCT/US2010/032158, PCT/US2010/050135, PCT/US2011/033596, U.S. patent application Ser. No. 12/473,917, U.S. Ser. No. 08/331,384, U.S. Ser. No. 09/670,277, U.S. Pat. No. 5,871,982, U.S. Pat. No. 5,856,152, U.S. Pat. No. 6,251,677, U.S. Pat. No. 6,387,368, U.S. Pat. No. 6,399,385, U.S. Pat. No. 7,906,111, European Patent Application No. EP2000103600, European Patent Publication No. EP797678, EP1046711, EP1668143, EP2359866, EP2359865, EP2357010, EP1046711, EP1218035, EP2345731, EP2298926, EP2292780, EP2292779, EP1668143, US20090197338, EP2383346, EP2359867, EP2359866, EP2359865, EP2357010, EP1866422, US20090317417, EP2016174, US Patent Publication Nos. US20110236353, US20070036760, US20100186103, US20120137379, and US20130281516, the contents of each of which are herein incorporated by reference in their entirety.

[0344] In some embodiments, the viral vector of the invention may include one or more constructs described in International Application Nos. PCT/US1999/004367, PCT/US2004/010965, PCT/US2005/014556, PCT/US2006/009699, PCT/US2010/032943, PCT/US2011/033628, PCT/US2011/033616, PCT/US2012/034355, U.S. Pat. No. 8,394,386, EP1742668, US Patent Publication Nos. US20080241189, US20120046349, US20130195801, US20140031418, EP2425000, US20130101558, EP1742668, EP2561075, EP2561073, EP2699688, the contents of each of which is herein incorporated by reference in its entirety.

[0345] In some embodiments, The present invention provides methods of producing viral vectors by (a) contacting a viral replication cell with one or more viral expression constructs encoding at least one chimeric capsid protein, and one or more payload construct vectors, wherein said payload construct vector comprises a payload construct encoding a payload molecule selected from the group consisting of a transgene, a polynucleotide encoding protein, and a modulatory nucleic acid; (b) culturing said viral replication cell under conditions such that at least one viral vector is produced, and (c) isolating said at least one viral vector.

[0346] In these methods a viral expression construct may encode at least one structural protein and at least one non-structural protein. The structural protein may comprise any of the native or wild type capsid proteins VP1, VP2 and/or VP3 or a chimeric protein.

[0347] The non-structural protein may comprise any of the native or wild type Rep78, Rep68, Rep52 and/or Rep40 proteins or a chimeric protein.

[0348] In some embodiments, contacting occurs via transient transfection, viral transduction and/or electroporation.

[0349] In some embodiments, the viral replication cell is selected from the group consisting of a mammalian cell and an insect cell. In some embodiments, the insect cell comprises a Spodoptera frugiperda (Sf9) cell.

[0350] The payload construct vector of the invention may comprise at least one inverted terminal repeat (ITR) and may comprise mammalian DNA.

[0351] In some embodiments, the payload construct vector comprises closed-ended, linear duplex (CELiD) DNA.

[0352] Also provided are viral vectors produced according to the methods described herein.

[0353] The viral vectors of the present invention may be formulated as a pharmaceutical composition with one or more acceptable excipients.

[0354] In one embodiment, a viral vector may be produced by a method described herein.

[0355] In one embodiment, the viral vector may be produced by contacting a viral replication cell (e.g., an insect cell or a mammalian cell) with at least one viral expression constructs encoding at least one chimeric capsid protein and at least one payload construct vectors. The viral replication cell may be contacted by transient transfection, viral transduction and/or electroporation. The payload construct vector may comprise a payload construct encoding a payload molecule such as, but not limited to, a transgene, a polynucleotide encoding protein, and a modulatory nucleic acid. The viral replication cell can be cultured under conditions such that at least one viral vector is produced, isolated (e.g., using temperature-induced lysis, mechanical lysis and/or chemical lysis) and/or purified (e.g., using filtration, chromatography and/or immunoaffinity purification). As a non-limiting example, the payload construct vector may comprise mammalian DNA.

[0356] In one embodiment, the viral vector is produced in an insect cell (e.g., Spodoptera frugiperda (Sf9) cell) using the method described herein. As a non-limiting example, the insect cell is contacted using viral transduction which may include baculoviral transduction.

[0357] In another embodiment, the viral vector is produced in a mammalian cell using the method described herein. As a non-limiting example, the mammalian cell is contacted using transient transfection.

[0358] In one embodiment, the viral expression construct may encode at least one structural protein and at least one non-structural protein. As a non-limiting example, the structural protein comprises VP1, VP2 and/or VP3. As another non-limiting example, the non-structural protein comprises Rep78, Rep68, Rep52 and/or Rep40.

[0359] In one embodiment, the viral expression construct may comprise a plasmid, payload construct vector with at least one inverted terminal repeat (ITR) and/or a payload construct vector with closed-ended, linear duplex (CELiD) DNA.

[0360] In one embodiment, the viral vector production method described herein produces greater than 10¹, greater than 10², greater than 10³, greater than 10⁴ or greater than 10⁵ viral vectors in a viral replication cell.

### Mammalian-Production System

[0361] Viral production of the invention disclosed herein describes processes and methods for producing viral vector that contacts a target cell to deliver a payload construct, e.g. a recombinant viral construct, which comprises a nucleotide encoding a payload molecule.

[0362] In one embodiment, the viral vector of the invention may be produced in a viral replication cell that comprises a mammalian cell.

[0363] Viral replication cells commonly used for production of recombinant AAV viral vector include, but is not limited to 293 cells, COS cells, HeLa cells, KB cells, and other mammalian cell lines as described in U.S. Pat. Nos. 6,156,303, 5,387,484, 5,741,683, 5,691,176, and 5,688,676; U.S. patent application 2002/0081721, and International Patent Publication Nos. WO 00/47757, WO 00/24916, and WO 96/17947, the contents of each of which are herein incorporated by reference in their entireties.

[0364] In one embodiment, viral vector produced in mammalian-cells wherein all three VP proteins are expressed at a stoichiometry approaching 1:1:10 (VP1:VP2:VP3). The regulatory mechanisms that allow this controlled level of expression include the production of two mRNAs, one for VP1, and the other for VP2 and VP3, produced by differential splicing.

### Baculovirus Production System

[0365] Viral production of the invention disclosed herein describes processes and methods for producing viral vector that contacts a target cell to deliver a payload construct, e.g. a recombinant viral construct, which comprises a nucleotide encoding a payload molecule.

[0366] In one embodiment, the process comprises production of viral vector in a baculoviral system using a viral expression construct and a payload construct vector as depicted in FIG. 2. Briefly, the viral expression construct and the payload construct vector of the invention are each incorporated by homologous recombination into a bacmid, also known as a baculovirus plasmid, by standard molecular biology techniques known and performed by a person skilled in the art. Two baculoviruses may be produced, one that comprises the viral expression construct, and another that comprises the payload construct vector. The two baculoviruses depicted in FIG. 2 may be used to infect a viral replication cell for production of viral vector.

[0367] Baculovirus expression vectors for producing viral vector in insect cells, including but not limited to Spodoptera frugiperda (Sf9) cells, provide high titers of viral vector product. Recombinant baculovirus encoding the viral expression construct and payload construct initiates a productive infection of viral vector replicating cells. Infectious baculovirus particles released from the primary infection secondarily infect additional cells in the culture, exponentially infecting the entire cell culture population in a number of infection cycles that is a function of the initial multiplicity of infection, see Urabe, M. et al. J Virol. 2006 February; 80(4):1874-85, the contents of which are herein incorporated by reference in their entirety.

[0368] Production of viral vector with baculovirus in an insect cell system may address known baculovirus genetic and physical instability. In one embodiment, the production system of the invention addresses baculovirus instability over multiple passages by utilizing a titerless infected-cells preservation and scale-up system. Small scale seed cultures of viral producing cells are transfected with viral expression constructs encoding the structural, non-structural, components of the viral vector. Baculovirus-infected viral producing cells are harvested into aliquots that may be cryopreserved in liquid nitrogen; the aliquots retain viability and infectivity for infection of large scale viral producing cell culture Wasilko D J et al. Protein Expr Purif. 2009 June; 65(2):122-32, the contents of which are herein incorporated by reference in their entirety.

[0369] A genetically stable baculovirus may be used to produce source of the one or more of the components for producing viral vector in invertebrate cells. In one embodiment, defective baculovirus expression vectors may be maintained episomally in insect cells. In such an embodiment the bacmid vector is engineered with replication control elements, including but not limited to promoters, enhancers, and/or cell-cycle regulated replication elements.

[0370] In one embodiment, baculoviruses may be engineered with a (non-) selectable marker for recombination into the chitinase/cathepsin locus. The chia/v-cath locus is non-essential for propagating baculovirus in tissue culture, and the V-cath (EC 3.4.22.50) is a cysteine endoprotease that is most active on Arg-Arg dipeptide containing substrates. The Arg-Arg dipeptide is present in densovirus and parvovirus capsid structural proteins but infrequently occurs in dependovirus VP1.

[0371] In one embodiment, stable viral producing cells permissive for baculovirus infection are engineered with at least one stable integrated copy of any of the elements necessary for AAV replication and vector production including, but not limited to, the entire AAV genome, Rep and Cap genes, Rep genes, Cap genes, each Rep protein as a separate transcription cassette, each VP protein as a separate transcription cassette, the AAP (assembly activation protein), or at least one of the baculovirus helper genes with native or non-native promoters.

### Insect Cells

[0372] Viral production of the invention disclosed herein describes processes and methods for producing viral vector that contacts a target cell to deliver a payload construct, e.g. a recombinant viral construct, which comprises a nucleotide encoding a payload molecule.

[0373] In one embodiment, the viral vector of the invention may be produced in a viral replication cell that comprises an insect cell.

[0374] Growing conditions for insect cells in culture, and production of heterologous products in insect cells in culture are well-known in the art, see U.S. Pat. No. 6,204,059, the contents of which are herein incorporated by reference in their entirety.

[0375] Any insect cell which allows for replication of parvovirus and which can be maintained in culture can be used in accordance with the present invention. Cell lines may be used from Spodoptera frupperda, including, but not limited to the Sf9 or Sf21 cell lines, drosophila cell lines, or mosquito cell lines, such as, Aedes albopictus derived cell lines. Use of insect cells for expression of heterologous proteins is well documented, as are methods of introducing nucleic acids, such as vectors, e.g., insect-cell compatible vectors, into such cells and methods of maintaining such cells in culture. See, for example, METHODS IN MOLECULAR BIOLOGY, ed. Richard, Humana Press, N J (1995); O'Reilly et al., BACULOVIRUS EXPRESSION VECTORS, A LABORATORY MANUAL, Oxford Univ. Press (1994); Samulski et al., J. Vir.63:3822-8 (1989); Kajigaya et al., Proc. Nat'l. Acad. Sci. USA 88: 4646-50 (1991); Ruffing et al., J. Vir. 66:6922-30 (1992); Kimbauer et al., Vir.219:37-44 (1996); Zhao et al., Vir.272:382-93 (2000); and Samulski et al., U.S. Pat. No. 6,204,059, the contents of each of which are herein incorporated by reference in their entirety.

### Viral Production

[0376] In one embodiment, an expression cell is a mammalian cell, such as HEK 293 cell line, for example, as described in U.S. Pat. No. 6,428,988, the contents of which are herein incorporated by reference in its entirety.

[0377] In one embodiment, the packaging cell line 293-10-3 (ATCC Accession No. PTA-2361) may be used to produce the viral vector, as described in U.S. Pat. No. 6,281,010, the contents of which are herein incorporated by reference in its entirety.

[0378] In some embodiments expression hosts include, but are not limited to, bacterial species within the genera Escherichia, Bacillus, Pseudomonas, Salmonella.

[0379] In other embodiments, cell expression systems may comprise established mammalian cell lines, such as COS-7, C127, 3T3, CHO, HeLa, and BHK.

[0380] In some embodiments, insect host cell systems, in combination with baculoviral systems (e.g., as described by Luckow et al., Bio/Technology 6: 47 (1988) may be used. In one embodiments, an expression system for preparing chimeric peptides is Trichoplusia ni, Tn 5B1-4 insect cells/baculoviral system, which can be used for high levels of proteins, as described in U.S. Pat. No. 6,660,521, the contents of which is herein incorporated by reference in its entirety.

[0381] In one embodiment, of the invention a cell line, such as a HeLA cell line, for trans-complementing E1 deleted adenoviral vectors, which encoding adenovirus E1a and adenovirus E1b under the control of a phosphoglycerate kinase (PGK) promoter can be used for viral vector production as described in U.S. Pat. No. 6,365,394, the contents of which is incorporated herein by reference in its entirety.

[0382] In one embodiment, a host cell which host cell which comprises AAV rep and cap genes stably integrated within the cell's chromosomes, may be used for viral vector production. In a non-limiting example, the a host cell which has stably integrated in its chromosome at least two copies of an AAV rep gene and AAV cap gene may be used to produce the viral vector according to the methods and constructs described in U.S. Pat. No. 7,238,526, the contents of which is incorporated herein by reference in its entirety.

[0383] In one embodiment, the viral vector can be produced in a host cell stably transformed with a molecule comprising the nucleic acid sequences which permit the regulated expression of a rare restriction enzyme in the host cell, as described in US20030092161 and EP1183380, the contents of which is herein incorporated by reference in its entirety.

[0384] In some embodiments, production methods and cell lines to produce the viral vector may include, but are not limited to those taught in PCT/US1996/010245, PCT/US1997/015716, PCT/US1997/015691, PCT/US1998/019479, PCT/US1998/019463, PCT/US2000/000415, PCT/US2000/040872, PCT/US2004/016614, PCT/US2007/010055, PCT/US1999/005870, PCT/US2000/004755, U.S. patent application Ser. No. 08/549,489, U.S. Ser. No. 08/462,014, U.S. Ser. No. 09/659,203, U.S. Ser. No. 10/246,447, U.S. Ser. No. 10/465,302, U.S. Pat. No. 6,281,010, U.S. Pat. No. 6,270,996, U.S. Pat. No. 6,261,551, U.S. Pat. No. 5,756,283 (Assigned to NIH), U.S. Pat. No. 6,428,988, U.S. Pat. No. 6,274,354, U.S. Pat. No. 6,943,019, U.S. Pat. No. 6,482,634, (Assigned to NIH: U.S. Pat. No. 7,238,526, U.S. Pat. No. 6,475,769), U.S. Pat. No. 6,365,394 (Assigned to NIH), U.S. Pat. No. 7,491,508, U.S. Pat. No. 7,291,498, U.S. Pat. No. 7,022,519, U.S. Pat. No. 6,485,966, U.S. Pat. No. 6,953,690, U.S. Pat. No. 6,258,595, EP2018421, EP1064393, EP1163354, EP835321, EP931158, EP950111, EP1015619, EP1183380, EP2018421, EP1226264, EP1636370, EP1163354, EP1064393, US20030032613, US20020102714, US20030073232, US20030040101 (Assigned to NIH), US20060003451, US20020090717, US20030092161, US20070231303, US20060211115, US20090275107, US2007004042, US20030119191, US20020019050, the contents of each of which are incorporated herein by reference in their entirety.

### Large-Scale Production

[0385] In some embodiments, viral vector production may be modified to increase the scale of production. Large scale viral production methods according to the present invention may include any of those taught in U.S. Pat. Nos. 5,756,283, 6,258,595, 6,261,551, 6,270,996, 6,281,010, 6,365,394, 6,475,769, 6,482,634, 6,485,966, 6,943,019, 6,953,690, 7,022,519, 7,238,526, 7,291,498 and 7,491,508 or International Publication Nos. WO1996039530, WO1998010088, WO1999014354, WO1999015685, WO1999047691, WO2000055342, WO2000075353 and WO2001023597, the contents of each of which are herein incorporated by reference by reference in their entirety. Methods of increasing viral vector production scale typically comprise increasing the number of viral replication cells. In some embodiments, viral replication cells comprise adherent cells. To increase the scale of viral vector production by adherent viral replication cells, larger cell culture surfaces are required. In some cases, large-scale production methods comprise the use of roller bottles to increase cell culture surfaces. Other cell culture substrates with increased surface areas are known in the art. Examples of additional adherent cell culture products with increased surface areas include, but are not limited to CELLSTACK®, CELLCUBE® (Corning Corp., Corning, N.Y.) and NUNC™ CELL FACTORY™ (Thermo Scientific, Waltham, Mass.) In some cases, large-scale adherent cell surfaces may comprise from about 1,000 cm² to about 100,000 cm². In some cases, large-scale adherent cell cultures may comprise from about 10⁷ to about 10⁹ cells, from about 10⁸ to about 10¹⁰ cells, from about 10⁹ to about 10¹² cells or at least 10¹² cells. In some cases, large-scale adherent cultures may produce from about 10⁹ to about 10¹², from about 10¹⁰ to about 10¹³, from about 10¹¹ to about 10¹⁴, from about 10¹² to about 10¹⁵ or at least 10¹⁵ viral vector particles.

[0386] In some embodiments, large-scale viral production methods of the present invention may comprise the use of suspension cell cultures. Suspension cell culture allows for significantly increased numbers of cells. Typically, the number of adherent cells that can be grown on about 10-50 cm² of surface area can be grown in about 1 cm³ volume in suspension.

[0387] Transfection of replication cells in large-scale culture formats may be carried out according to any methods known in the art. For large-scale adherent cell cultures, transfection methods may include, but are not limited to the use of inorganic compounds (e.g. calcium phosphate,) organic compounds (e.g. polyethyleneimine (PEI)) or the use of non-chemical methods (e.g. electroporation.) With cells grown in suspension, transfection methods may include, but are not limited to the use of calcium phosphate and the use of PEI. In some cases, transfection of large scale suspension cultures may be carried out according to the section entitled “Transfection Procedure” described in Feng, L. et al., 2008. Biotechnol Appl Biochem. 50:121-32, the contents of which are herein incorporated by reference in their entirety. According to such embodiments, PEI-DNA complexes may be formed for introduction of plasmids to be transfected. In some cases, cells being transfected with PEI-DNA complexes may be ‘shocked’ prior to transfection. This comprises lowering cell culture temperatures to 4° C. for a period of about 1 hour. In some cases, cell cultures may be shocked for a period of from about 10 minutes to about 5 hours. In some cases, cell cultures may be shocked at a temperature of from about 0° C. to about 20° C.

[0388] In some cases, transfections may include one or more vectors for expression of an RNA effector molecule to reduce expression of nucleic acids from one or more payload construct. Such methods may enhance the production of viral vectors by reducing cellular resources wasted on expressing payload constructs. In some cases, such methods may be carried according to those taught in US Publication No. US2014/0099666, the contents of which are herein incorporated by reference in their entirety.

### Bioreactors

[0389] In some embodiments, cell culture bioreactors may be used for large scale viral vector production. In some cases, bioreactors comprise stirred tank reactors. Such reactors generally comprise a vessel, typically cylindrical in shape, with a stirrer (e.g. impeller.) In some embodiments, such bioreactor vessels may be placed within a water jacket to control vessel temperature and/or to minimize effects from ambient temperature changes. Bioreactor vessel volume may range in size from about 500 ml to about 2 L, from about 1 L to about 5 L, from about 2.5 L to about 20 L, from about 10 L to about 50 L, from about 25 L to about 100 L, from about 75 L to about 500 L, from about 250 L to about 2,000 L, from about 1,000 L to about 10,000 L, from about 5,000 L to about 50,000 L or at least 50,000 L. Vessel bottoms may be rounded or flat. In some cases, animal cell cultures may be maintained in bioreactors with rounded vessel bottoms.

[0390] In some cases, bioreactor vessels may be warmed through the use of a thermocirculator. Thermocirculators pump heated water around water jackets. In some cases, heated water may be pumped through pipes (e.g. coiled pipes) that are present within bioreactor vessels. In some cases, warm air may be circulated around bioreactors, including, but not limited to air space directly above culture medium. Additionally, pH and CO₂ levels may be maintained to optimize cell viability.

[0391] In some cases, bioreactors may comprise hollow-fiber reactors. Hollow-fiber bioreactors may support the culture of both anchorage dependent and anchorage independent cells. Further bioreactors may include, but are not limited to packed-bed or fixed-bed bioreactors. Such bioreactors may comprise vessels with glass beads for adherent cell attachment. Further packed-bed reactors may comprise ceramic beads.

[0392] In some cases, viral vectors are produced through the use of a disposable bioreactor. In some embodiments, such bioreactors may include WAVE™ disposable bioreactors.

[0393] In some embodiments, viral vector production in animal cell bioreactor cultures may be carried out according to the methods taught in U.S. Pat. Nos. 5,064,764, 6,194,191, 6,566,118, 8,137,948 or US Patent Application No. US2011/0229971, the contents of each of which are herein incorporated by reference in their entirety.

### Cell Lysis

[0394] Cells of the invention, including, but not limited to viral production cells, may be subjected to cell lysis according to any methods known in the art. Cell lysis may be carried out to obtain one or more agents (e.g. viral vectors) present within any cells of the invention. In some embodiments, cell lysis may be carried out according to any of the methods listed in U.S. Pat. Nos. 7,326,555, 7,579,181, 7,048,920, 6,410,300, 6,436,394, 7,732,129, 7,510,875, 7,445,930, 6,726,907, 6,194,191, 7,125,706, 6,995,006, 6,676,935, 7,968,333, 5,756,283, 6,258,595, 6,261,551, 6,270,996, 6,281,010, 6,365,394, 6,475,769, 6,482,634, 6,485,966, 6,943,019, 6,953,690, 7,022,519, 7,238,526, 7,291,498 and 7,491,508 or International Publication Nos. WO1996039530, WO1998010088, WO1999014354, WO1999015685, WO1999047691, WO2000055342, WO2000075353 and WO2001023597, the contents of each of which are herein incorporated by reference in their entirety. Cell lysis methods may be chemical or mechanical. Chemical cell lysis typically comprises contacting one or more cells with one or more lysis agent. Mechanical lysis typically comprises subjecting one or more cells to one or more lysis condition and/or one or more lysis force.

[0395] In some embodiments, chemical lysis may be used to lyse cells. As used herein, the term “lysis agent” refers to any agent that may aid in the disruption of a cell. In some cases, lysis agents are introduced in solutions, termed lysis solutions or lysis buffers. As used herein, the term “lysis solution” refers to a solution (typically aqueous) comprising one or more lysis agent. In addition to lysis agents, lysis solutions may include one or more buffering agents, solubilizing agents, surfactants, preservatives, cryoprotectants, enzymes, enzyme inhibitors and/or chelators. Lysis buffers are lysis solutions comprising one or more buffering agent. Additional components of lysis solutions may include one or more solubilizing agent. As used herein, the term “solubilizing agent” refers to a compound that enhances the solubility of one or more components of a solution and/or the solubility of one or more entities to which solutions are applied. In some cases, solubilizing agents enhance protein solubility. In some cases, solubilizing agents are selected based on their ability to enhance protein solubility while maintaining protein conformation and/or activity.

[0396] Exemplary lysis agents may include any of those described in U.S. Pat. Nos. 8,685,734, 7,901,921, 7,732,129, 7,223,585, 7,125,706, 8,236,495, 8,110,351, 7,419,956, 7,300,797, 6,699,706 and 6,143,567, the contents of each of which are herein incorporated by reference in their entirety. In some cases, lysis agents may be selected from lysis salts, amphoteric agents, cationic agents, ionic detergents and non-ionic detergents. Lysis salts may include, but are not limited to sodium chloride (NaCl) and potassium chloride (KCl). Further lysis salts may include any of those described in U.S. Pat. Nos. 8,614,101, 7,326,555, 7,579,181, 7,048,920, 6,410,300, 6,436,394, 7,732,129, 7,510,875, 7,445,930, 6,726,907, 6,194,191, 7,125,706, 6,995,006, 6,676,935 and 7,968,333, the contents of each of which are herein incorporated by reference in their entirety. Concentrations of salts may be increased or decreased to obtain an effective concentration for rupture of cell membranes. Amphoteric agents, as referred to herein, are compounds capable of reacting as an acid or a base. Amphoteric agents may include, but are not limited to lysophosphatidylcholine, 3-((3-Cholamidopropyl)dimethylammonium)-1-propanesulfonate (CHAPS), ZWITTERGENT® and the like. Cationic agents may include, but are not limited to cetyltrimethylammonium bromide (C(16)TAB) and Benzalkonium chloride. Lysis agents comprising detergents may include ionic detergents or non-ionic detergents. Detergents may function to break apart or dissolve cell structures including, but not limited to cell membranes, cell walls, lipids, carbohydrates, lipoproteins and glycoproteins. Exemplary ionic detergents include any of those taught in U.S. Pat. Nos. 7,625,570 and 6,593,123 or US Publication No. US2014/0087361, the contents of each of which are herein incorporated by reference in their entirety. Some ionic detergents may include, but are not limited to sodium dodecyl sulfate (SDS), cholate and deoxycholate. In some cases, ionic detergents may be included in lysis solutions as a solubilizing agent. Non-ionic detergents may include, but are not limited to octylglucoside, digitonin, lubrol, C12E8, TWEEN®-20, TWEEN®-80, Triton X-100 and Noniodet P-40. Non-ionic detergents are typically weaker lysis agents, but may be included as solubilizing agents for solubilizing cellular and/or viral proteins. Further lysis agents may include enzymes and urea. In some cases, one or more lysis agents may be combined in a lysis solution in order to enhance one or more of cell lysis and protein solubility. In some cases, enzyme inhibitors may be included in lysis solutions in order to prevent proteolysis that may be triggered by cell membrane disruption.

[0397] In some embodiments, mechanical cell lysis is carried out. Mechanical cell lysis methods may include the use of one or more lysis condition and/or one or more lysis force. As used herein, the term “lysis condition” refers to a state or circumstance that promotes cellular disruption. Lysis conditions may comprise certain temperatures, pressures, osmotic purity, salinity and the like. In some cases, lysis conditions comprise increased or decreased temperatures. According to some embodiments, lysis conditions comprise changes in temperature to promote cellular disruption. Cell lysis carried out according to such embodiments may include freeze-thaw lysis. As used herein, the term “freeze-thaw lysis” refers to cellular lysis in which a cell solution is subjected to one or more freeze-thaw cycle. According to freeze-thaw lysis methods, cells in solution are frozen to induce a mechanical disruption of cellular membranes caused by the formation and expansion of ice crystals. Cell solutions used according freeze-thaw lysis methods, may further comprise one or more lysis agents, solubilizing agents, buffering agents, cryoprotectants, surfactants, preservatives, enzymes, enzyme inhibitors and/or chelators. Once cell solutions subjected to freezing are thawed, such components may enhance the recovery of desired cellular products. In some cases, one or more cyroprotectants are included in cell solutions undergoing freeze-thaw lysis. As used herein, the term “cryoprotectant” refers to an agent used to protect one or more substance from damage due to freezing. Cryoprotectants of the invention may include any of those taught in US Publication No. US2013/0323302 or U.S. Pat. Nos. 6,503,888, 6,180,613, 7,888,096, 7,091,030, the contents of each of which are herein incorporated by reference in their entirety. In some cases, cryoprotectants may include, but are not limited to dimethyl sulfoxide, 1,2-propanediol, 2,3-butanediol, formamide, glycerol, ethylene glycol, 1,3-propanediol and n-dimethyl formamide, polyvinylpyrrolidone, hydroxyethyl starch, agarose, dextrans, inositol, glucose, hydroxyethylstarch, lactose, sorbitol, methyl glucose, sucrose and urea. In some embodiments, freeze-thaw lysis may be carried out according to any of the methods described in U.S. Pat. No. 7,704,721, the contents of which are herein incorporated by reference in their entirety.

[0398] As used herein, the term “lysis force” refers to a physical activity used to disrupt a cell. Lysis forces may include, but are not limited to mechanical forces, sonic forces, gravitational forces, optical forces, electrical forces and the like. Cell lysis carried out by mechanical force is referred to herein as “mechanical lysis.” Mechanical forces that may be used according to mechanical lysis may include high shear fluid forces. According to such methods of mechanical lysis, a microfluidizer may be used. Microfluidizers typically comprise an inlet reservoir where cell solutions may be applied. Cell solutions may then be pumped into an interaction chamber via a pump (e.g. high-pressure pump) at high speed and/or pressure to produce shear fluid forces. Resulting lysates may then be collected in one or more output reservoir. Pump speed and/or pressure may be adjusted to modulate cell lysis and enhance recovery of products (e.g. viral vectors). Other mechanical lysis methods may include physical disruption of cells by scraping.

[0399] Cell lysis methods may be selected based on the cell culture format of cells to be lysed. For example, with adherent cell cultures, some chemical and mechanical lysis methods may be used. Such mechanical lysis methods may include freeze-thaw lysis or scraping. In another example, chemical lysis of adherent cell cultures may be carried out through incubation with lysis solutions comprising surfactant, such as Triton-X-100. In some cases, cell lysates generated from adherent cell cultures may be treated with one more nuclease to lower the viscosity of the lysates caused by liberated DNA.

[0400] In one embodiment, a method for harvesting AAV without lysis may be used for efficient and scalable AAV production. In a non-limiting example, Viral vectors may be produced by culturing an AAV lacking a heparin binding site, thereby allowing the AAV to pass into the supernatant, in a cell culture, collecting supernatant from the culture; and isolating the AAV from the supernatant, as described in US Patent Application 20090275107, the contents of which is incorporated herein by reference in its entirety.

### Clarification

[0401] Cell lysates comprising viral vectors may be subjected to clarification. Clarification refers to initial steps taken in purification of viral vectors from cell lysates. Clarification serves to prepare lysates for further purification by removing larger, insoluble debris. Clarification steps may include, but are not limited to centrifugation and filtration. During clarification, centrifugation may be carried out at low speeds to remove larger debris, only. Similarly, filtration may be carried out using filters with larger pore sizes so that only larger debris is removed. In some cases, tangential flow filtration may be used during clarification. Objectives of viral clarification include high throughput processing of cell lysates and to optimize ultimate viral recovery. Advantages of including a clarification step include scalability for processing of larger volumes of lysate. In some embodiments, clarification may be carried out according to any of the methods presented in U.S. Pat. Nos. 8,524,446, 5,756,283, 6,258,595, 6,261,551, 6,270,996, 6,281,010, 6,365,394, 6,475,769, 6,482,634, 6,485,966, 6,943,019, 6,953,690, 7,022,519, 7,238,526, 7,291,498, 7,491,508, US Publication Nos. US2013/0045186, US2011/0263027, US2011/0151434, US2003/0138772, and International Publication Nos. WO2002012455, WO1996039530, WO1998010088, WO1999014354, WO1999015685, WO1999047691, WO2000055342, WO2000075353 and WO2001023597, the contents of each of which are herein incorporated by reference in their entirety.

[0402] Methods of cell lysate clarification by filtration are well understood in the art and may be carried out according to a variety of available methods including, but not limited to passive filtration and flow filtration. Filters used may comprise a variety of materials and pore sizes. For example, cell lysate filters may comprise pore sizes of from about 1 μM to about 5 μM, from about 0.5 μM to about 2 μM, from about 0.1 μM to about 1 μM, from about 0.05 μM to about 0.05 μM and from about 0.001 μM to about 0.1 μM. Exemplary pore sizes for cell lysate filters may include, but are not limited to, 2.0, 1.9, 1.8, 1.7, 1.6, 1.5, 1.4, 1.3, 1.2, 1.1, 1, 0.9, 0.8, 0.7, 0.6, 0.5, 0.4, 0.3, 0.2, 0.1, 0.95, 0.9, 0.85, 0.8, 0.75, 0.7, 0.65, 0.6, 0.55, 0.5, 0.45, 0.4, 0.35, 0.3, 0.25, 0.2, 0.15, 0.1, 0.05, 0.22, 0.21, 0.20, 0.19, 0.18, 0.17, 0.16, 0.15, 0.14, 0.13, 0.12, 0.11, 0.1, 0.09, 0.08, 0.07, 0.06, 0.05, 0.04, 0.03, 0.02, 0.01, 0.02, 0.019, 0.018, 0.017, 0.016, 0.015, 0.014, 0.013, 0.012, 0.011, 0.01, 0.009, 0.008, 0.007, 0.006, 0.005, 0.004, 0.003, 0.002, 0.001 and 0.001 μM. In one embodiment, clarification may comprise filtration through a filter with 2.0 μM pore size to remove large debris, followed by passage through a filter with 0.45 μM pore size to remove intact cells.

[0403] Filter materials may be composed of a variety of materials. Such materials may include, but are not limited to polymeric materials and metal materials (e.g. sintered metal and pored aluminum.) Exemplary materials may include, but are not limited to nylon, cellulose materials (e.g. cellulose acetate), polyvinylidene fluoride (PVDF), polyethersulfone, polyamide, polysulfone, polypropylene and polyethylene terephthalate. In some cases, filters useful for clarification of cell lysates may include, but are not limited to ULTIPLEAT PROFILE™ filters (Pall Corporation, Port Washington, N.Y.), SUPOR™ membrane filters (Pall Corporation, Port Washington, N.Y.).

[0404] In some cases, flow filtration may be carried out to increase filtration speed and/or effectiveness. In some cases, flow filtration may comprise vacuum filtration. According to such methods, a vacuum is created on the side of the filter opposite that of cell lysate to be filtered. In some cases, cell lysates may be passed through filters by centrifugal forces. In some cases, a pump is used to force cell lysate through clarification filters. Flow rate of cell lysate through one or more filters may be modulated by adjusting one of channel size and/or fluid pressure.

[0405] According to some embodiments, cell lysates may be clarified by centrifugation. Centrifugation may be used to pellet insoluble particles in the lysate. During clarification, centrifugation strength (expressed in terms of gravitational units (g), which represents multiples of standard gravitational force) may be lower than in subsequent purification steps. In some cases, centrifugation may be carried out on cell lysates at from about 200 g to about 800 g, from about 500 g to about 1500 g, from about 1000 g to about 5000 g, from about 1200 g to about 10000 g or from about 8000 g to about 15000 g. In some embodiments, cell lysate centrifugation is carried out at 8000 g for 15 minutes. In some cases, density gradient centrifugation may be carried out in order to partition particulates in the cell lysate by sedimentation rate. Gradients used according to methods of the present invention may include, but are not limited to cesium chloride gradients and iodixanol step gradients.

### Purification—Chromatography

[0406] In some cases, viral vectors may be purified from clarified cell lysates by one or more methods of chromatography. Chromatography refers to any number of methods known in the art for separating out one or more elements from a mixture. Such methods may include, but are not limited to ion exchange chromatography (e.g. cation exchange chromatography and anion exchange chromatography), immunoaffinity chromatography and size-exclusion chromatography. In some embodiments, methods of viral chromatography may include any of those taught in U.S. Pat. Nos. 5,756,283, 6,258,595, 6,261,551, 6,270,996, 6,281,010, 6,365,394, 6,475,769, 6,482,634, 6,485,966, 6,943,019, 6,953,690, 7,022,519, 7,238,526, 7,291,498 and 7,491,508 or International Publication Nos. WO1996039530, WO1998010088, WO1999014354, WO1999015685, WO1999047691, WO2000055342, WO2000075353 and WO2001023597, the contents of each of which are herein incorporated by reference by reference in their entirety.

[0407] In some embodiments, ion exchange chromatography may be used to isolate viral vectors. Ion exchange chromatography is used to bind viral vectors based on charge-charge interactions between capsid proteins and charged sites present on a stationary phase, typically a column through which viral preparations (e.g. clarified lysates) are passed. After application of viral preparations, bound viral vectors may then be eluted by applying an elution solution to disrupt the charge-charge interactions. Elution solutions may be optimized by adjusting salt concentration and/or pH to enhance recovery of bound viral vectors. Depending on the charge of viral capsids being isolated, cation or anion exchange chromatography methods may be selected. Methods of ion exchange chromatography may include, but are not limited to any of those taught in U.S. Pat. Nos. 7,419,817, 6,143,548, 7,094,604, 6,593,123, 7,015,026 and 8,137,948, the contents of each of which are herein incorporated by reference in their entirety.

[0408] In some embodiments, immunoaffinity chromatography may be used. Immunoaffinity chromatography is a form of chromatography that utilizes one or more immune compounds (e.g. antibodies or antibody-related structures) to retain viral vectors. Immune compounds may bind specifically to one or more structures on viral vector surfaces, including, but not limited to one or more viral coat protein. In some cases, immune compounds may be specific for a particular viral variant. In some cases, immune compounds may bind to multiple viral variants. In some embodiments, immune compounds may include recombinant single-chain antibodies. Such recombinant single chain antibodies may include those described in Smith, R. H. et al., 2009. Mol Ther. 17(11):1888-96, the contents of which are herein incorporated by reference in their entirety. Such immune compounds are capable of binding to several AAV capsid variants, including, but not limited to AAV1, AAV2, AAV6 and AAV8.

[0409] In some embodiments, size-exclusion chromatography (SEC) may be used. SEC may comprise the use of a gel to separate particles according to size. In viral vector purification, SEC filtration is sometimes referred to as “polishing.” In some cases, SEC may be carried out to generate a final product that is near-homogenous. Such final products may in some cases be used in pre-clinical studies and/or clinical studies (Kotin, R. M. 2011. Human Molecular Genetics. 20(1):R2-R6, the contents of which are herein incorporated by reference in their entirety). In some cases, SEC may be carried out according to any of the methods taught in U.S. Pat. Nos. 6,143,548, 7,015,026, 8,476,418, 6,410,300, 8,476,418, 7,419,817, 7,094,604, 6,593,123, and 8,137,948, the contents of each of which are herein incorporated by reference in their entirety.

[0410] In one embodiment, the compositions comprising at least one viral vector may be isolated or purified using the methods described in U.S. Pat. No. 6,146,874, the contents of which are herein incorporated by reference in its entirety.

[0411] In one embodiment, the compositions comprising at least one viral vector may be isolated or purified using the methods described in U.S. Pat. No. 6,660,514, the contents of which are herein incorporated by reference in its entirety.

[0412] In one embodiment, the compositions comprising at least one viral vector may be isolated or purified using the methods described in U.S. Pat. No. 8,283,151, the contents of which are herein incorporated by reference in its entirety.

[0413] In one embodiment, the compositions comprising at least one viral vector may be isolated or purified using the methods described in U.S. Pat. No. 8,524,446, the contents of which are herein incorporated by reference in its entirety.

### V. PHARMACEUTICAL COMPOSITIONS AND DELIVERY

[0414] Although the descriptions of pharmaceutical compositions, e.g., those viral vectors comprising a payload to be delivered, provided herein are principally directed to pharmaceutical compositions which are suitable for administration to humans, it will be understood by the skilled artisan that such compositions are generally suitable for administration to any other animal, e.g., to non-human animals, e.g. non-human mammals. Modification of pharmaceutical compositions suitable for administration to humans in order to render the compositions suitable for administration to various animals is well understood, and the ordinarily skilled veterinary pharmacologist can design and/or perform such modification with merely ordinary, if any, experimentation. Subjects to which administration of the pharmaceutical compositions is contemplated include, but are not limited to, humans and/or other primates; mammals, including commercially relevant mammals such as cattle, pigs, horses, sheep, cats, dogs, mice, and/or rats; and/or birds, including commercially relevant birds such as poultry, chickens, ducks, geese, and/or turkeys.

[0415] In some embodiments, compositions are administered to humans, human patients or subjects. For the purposes of the present disclosure, the phrase “active ingredient” generally refers either to the viral vector carrying the payload or to the payload molecule delivered by the viral vector as described herein.

[0416] Formulations of the pharmaceutical compositions described herein may be prepared by any method known or hereafter developed in the art of pharmacology. In general, such preparatory methods include the step of bringing the active ingredient into association with an excipient and/or one or more other accessory ingredients, and then, if necessary and/or desirable, dividing, shaping and/or packaging the product into a desired dose unit.

[0417] Relative amounts of the active ingredient, the pharmaceutically acceptable excipient, and/or any additional ingredients in a pharmaceutical composition in accordance with the invention will vary, depending upon the identity, size, and/or condition of the subject treated and further depending upon the route by which the composition is to be administered.

### Formulation

[0418] The viral vectors of the invention can be formulated using one or more excipients to: (1) increase stability; (2) increase cell transfection or transduction; (3) permit the sustained or delayed release; (4) alter the biodistribution (e.g., target the viral vector to specific tissues or cell types); (5) increase the translation of encoded protein in vivo; and/or (6) alter the release profile of encoded protein in vivo.

[0419] Formulations of the present invention can include, without limitation, saline, lipidoids, liposomes, lipid nanoparticles, polymers, lipoplexes, core-shell nanoparticles, peptides, proteins, cells transfected with viral vectors (e.g., for transplantation into a subject), nanoparticle mimics and combinations thereof. Further, the viral vectors of the present invention may be formulated using self-assembled nucleic acid nanoparticles.

[0420] Formulations of the pharmaceutical compositions described herein may be prepared by any method known or hereafter developed in the art of pharmacology. In general, such preparatory methods include the step of associating the active ingredient with an excipient and/or one or more other accessory ingredients.

[0421] A pharmaceutical composition in accordance with the present disclosure may be prepared, packaged, and/or sold in bulk, as a single unit dose, and/or as a plurality of single unit doses. As used herein, a “unit dose” refers to a discrete amount of the pharmaceutical composition comprising a predetermined amount of the active ingredient. The amount of the active ingredient is generally equal to the dosage of the active ingredient which would be administered to a subject and/or a convenient fraction of such a dosage such as, for example, one-half or one-third of such a dosage.

[0422] Relative amounts of the active ingredient, the pharmaceutically acceptable excipient, and/or any additional ingredients in a pharmaceutical composition in accordance with the present disclosure may vary, depending upon the identity, size, and/or condition of the subject being treated and further depending upon the route by which the composition is to be administered. For example, the composition may comprise between 0.1% and 99% (w/w) of the active ingredient. By way of example, the composition may comprise between 0.1% and 100%, e.g., between 0.5 and 50%, between 1-30%, between 5-80%, at least 80% (w/w) active ingredient.

[0423] In some embodiments, the formulations described herein may contain at least one payload molecule. As a non-limiting example, the formulations may contain 1, 2, 3, 4 or 5 payload molecules. In one embodiment the formulation may contain a payload construct encoding proteins selected from categories such as, but not limited to, human proteins, veterinary proteins, bacterial proteins, biological proteins, antibodies, immunogenic proteins, therapeutic peptides and proteins, secreted proteins, plasma membrane proteins, cytoplasmic and cytoskeletal proteins, intracellular membrane bound proteins, nuclear proteins, proteins associated with human disease and/or proteins associated with non-human diseases. In one embodiment, the formulation contains at least three payload construct encoding proteins.

[0424] The formulations of the invention can include one or more excipients, each in an amount that together increases the stability of the viral vector, increases cell transfection or transduction by the viral vector, increases the expression of viral vector encoded protein, and/or alters the release profile of viral vector encoded proteins. In some embodiments, a pharmaceutically acceptable excipient may be at least 95%, at least 96%, at least 97%, at least 98%, at least 99%, or 100% pure. In some embodiments, an excipient is approved for use for humans and for veterinary use. In some embodiments, an excipient may be approved by United States Food and Drug Administration. In some embodiments, an excipient may be of pharmaceutical grade. In some embodiments, an excipient may meet the standards of the United States Pharmacopoeia (USP), the European Pharmacopoeia (EP), the British Pharmacopoeia, and/or the International Pharmacopoeia.

[0425] Excipients, which, as used herein, includes, but is not limited to, any and all solvents, dispersion media, diluents, or other liquid vehicles, dispersion or suspension aids, surface active agents, isotonic agents, thickening or emulsifying agents, preservatives, and the like, as suited to the particular dosage form desired. Various excipients for formulating pharmaceutical compositions and techniques for preparing the composition are known in the art (see Remington: The Science and Practice of Pharmacy, 21^{st} Edition, A. R. Gennaro, Lippincott, Williams & Wilkins, Baltimore, Md., 2006; incorporated herein by reference in its entirety). The use of a conventional excipient medium may be contemplated within the scope of the present disclosure, except insofar as any conventional excipient medium may be incompatible with a substance or its derivatives, such as by producing any undesirable biological effect or otherwise interacting in a deleterious manner with any other component(s) of the pharmaceutical composition.

[0426] Exemplary diluents include, but are not limited to, calcium carbonate, sodium carbonate, calcium phosphate, dicalcium phosphate, calcium sulfate, calcium hydrogen phosphate, sodium phosphate lactose, sucrose, cellulose, microcrystalline cellulose, kaolin, mannitol, sorbitol, inositol, sodium chloride, dry starch, cornstarch, powdered sugar, etc., and/or combinations thereof.

[0427] Exemplary granulating and/or dispersing agents include, but are not limited to, potato starch, corn starch, tapioca starch, sodium starch glycolate, clays, alginic acid, guar gum, citrus pulp, agar, bentonite, cellulose and wood products, natural sponge, cation-exchange resins, calcium carbonate, silicates, sodium carbonate, cross-linked poly(vinyl-pyrrolidone) (crospovidone), sodium carboxymethyl starch (sodium starch glycolate), carboxymethyl cellulose, cross-linked sodium carboxymethyl cellulose (croscarmellose), methylcellulose, pregelatinized starch (starch 1500), microcrystalline starch, water insoluble starch, calcium carboxymethyl cellulose, magnesium aluminum silicate)(VEEGUM®, sodium lauryl sulfate, quaternary ammonium compounds, etc., and/or combinations thereof.

[0428] Exemplary surface active agents and/or emulsifiers include, but are not limited to, natural emulsifiers (e.g. acacia, agar, alginic acid, sodium alginate, tragacanth, chondrux, cholesterol, xanthan, pectin, gelatin, egg yolk, casein, wool fat, cholesterol, wax, and lecithin), colloidal clays (e.g. bentonite [aluminum silicate] and VEEGUM® [magnesium aluminum silicate]), long chain amino acid derivatives, high molecular weight alcohols (e.g. stearyl alcohol, cetyl alcohol, oleyl alcohol, triacetin monostearate, ethylene glycol distearate, glyceryl monostearate, and propylene glycol monostearate, polyvinyl alcohol), carbomers (e.g. carboxy polymethylene, polyacrylic acid, acrylic acid polymer, and carboxyvinyl polymer), carrageenan, cellulosic derivatives (e.g. carboxymethylcellulose sodium, powdered cellulose, hydroxymethyl cellulose, hydroxypropyl cellulose, hydroxypropyl methylcellulose, methylcellulose), sorbitan fatty acid esters (e.g. polyoxyethylene sorbitan monolaurate [TWEEN® 20], polyoxyethylene sorbitan [TWEEN® 60], polyoxyethylene sorbitan monooleate [TWEEN® 80], sorbitan monopalmitate [SPAN® 40], sorbitan monostearate [SPAN® 60], sorbitan tristearate [SPAN® 65], glyceryl monooleate, sorbitan monooleate [SPAN® 80]), polyoxyethylene esters (e.g. polyoxyethylene monostearate [MYRJ® 45], polyoxyethylene hydrogenated castor oil, polyethoxylated castor oil, polyoxymethylene stearate, and SOLUTOL®), sucrose fatty acid esters, polyethylene glycol fatty acid esters (e.g. CREMOPHOR®), polyoxyethylene ethers, (e.g. polyoxyethylene lauryl ether [BRIJ®30]), poly(vinyl-pyrrolidone), diethylene glycol monolaurate, triethanolamine oleate, sodium oleate, potassium oleate, ethyl oleate, oleic acid, ethyl laurate, sodium lauryl sulfate, PLUORINC® F. 68, POLOXAMER®188, cetrimonium bromide, cetylpyridinium chloride, benzalkonium chloride, docusate sodium, etc. and/or combinations thereof.

[0429] Exemplary binding agents include, but are not limited to, starch (e.g. cornstarch and starch paste); gelatin; sugars (e.g. sucrose, glucose, dextrose, dextrin, molasses, lactose, lactitol, mannitol); amino acids (e.g., glycine); natural and synthetic gums (e.g. acacia, sodium alginate, extract of Irish moss, panwar gum, ghatti gum, mucilage of isapol husks, carboxymethylcellulose, methylcellulose, ethylcellulose, hydroxyethylcellulose, hydroxypropyl cellulose, hydroxypropyl methylcellulose, microcrystalline cellulose, cellulose acetate, poly(vinyl-pyrrolidone), magnesium aluminum silicate)(VEEGUM®, and larch arabogalactan); alginates; polyethylene oxide; polyethylene glycol; inorganic calcium salts; silicic acid; polymethacrylates; waxes; water; alcohol; etc.; and combinations thereof.

[0430] Exemplary preservatives may include, but are not limited to, antioxidants, chelating agents, antimicrobial preservatives, antifungal preservatives, alcohol preservatives, acidic preservatives, and/or other preservatives. Oxidation is a potential degradation pathway for mRNA, especially for liquid mRNA formulations. In order to prevent oxidation, antioxidants can be added to the formulation. Exemplary antioxidants include, but are not limited to, alpha tocopherol, ascorbic acid, acorbyl palmitate, benzyl alcohol, butylated hydroxyanisole, EDTA, m-cresol, methionine, butylated hydroxytoluene, monothioglycerol, potassium metabisulfite, propionic acid, propyl gallate, sodium ascorbate, sodium bisulfite, sodium metabisulfite, thioglycerol and/or sodium sulfite. Exemplary chelating agents include ethylenediaminetetraacetic acid (EDTA), citric acid monohydrate, disodium edetate, dipotassium edetate, edetic acid, fumaric acid, malic acid, phosphoric acid, sodium edetate, tartaric acid, and/or trisodium edetate. Exemplary antimicrobial preservatives include, but are not limited to, benzalkonium chloride, benzethonium chloride, benzyl alcohol, bronopol, cetrimide, cetylpyridinium chloride, chlorhexidine, chlorobutanol, chlorocresol, chloroxylenol, cresol, ethyl alcohol, glycerin, hexetidine, imidurea, phenol, phenoxyethanol, phenylethyl alcohol, phenylmercuric nitrate, propylene glycol, and/or thimerosal. Exemplary antifungal preservatives include, but are not limited to, butyl paraben, methyl paraben, ethyl paraben, propyl paraben, benzoic acid, hydroxybenzoic acid, potassium benzoate, potassium sorbate, sodium benzoate, sodium propionate, and/or sorbic acid. Exemplary alcohol preservatives include, but are not limited to, ethanol, polyethylene glycol, phenol, phenolic compounds, bisphenol, chlorobutanol, hydroxybenzoate, and/or phenylethyl alcohol. Exemplary acidic preservatives include, but are not limited to, vitamin A, vitamin C, vitamin E, beta-carotene, citric acid, acetic acid, dehydroacetic acid, ascorbic acid, sorbic acid, and/or phytic acid. Other preservatives include, but are not limited to, tocopherol, tocopherol acetate, deteroxime mesylate, cetrimide, butylated hydroxyanisol (BHA), butylated hydroxytoluened (BHT), ethylenediamine, sodium lauryl sulfate (SLS), sodium lauryl ether sulfate (SLES), sodium bisulfite, sodium metabisulfite, potassium sulfite, potassium metabisulfite, GLYDANT PLUS®, PHENONIP®, methylparaben, GERMALL®115, GERMABEN®II, NEOLONE™, KATHON™, and/or EUXYL®.

[0431] Exemplary buffering agents may also include, but are not limited to, citrate buffer solutions, acetate buffer solutions, phosphate buffer solutions, ammonium chloride, calcium carbonate, calcium chloride, calcium citrate, calcium glubionate, calcium gluceptate, calcium gluconate, D-gluconic acid, calcium glycerophosphate, calcium lactate, propanoic acid, calcium levulinate, pentanoic acid, dibasic calcium phosphate, phosphoric acid, tribasic calcium phosphate, calcium hydroxide phosphate, potassium acetate, potassium chloride, potassium gluconate, potassium mixtures, dibasic potassium phosphate, monobasic potassium phosphate, potassium phosphate mixtures, sodium acetate, sodium bicarbonate, sodium chloride, sodium citrate, sodium lactate, dibasic sodium phosphate, monobasic sodium phosphate, sodium phosphate mixtures, tromethamine, magnesium hydroxide, aluminum hydroxide, alginic acid, pyrogen-free water, isotonic saline, Ringer's solution, ethyl alcohol, etc., and/or combinations thereof.

[0432] Exemplary lubricating agents include, but are not limited to, magnesium stearate, calcium stearate, stearic acid, silica, talc, malt, glyceryl behanate, hydrogenated vegetable oils, polyethylene glycol, sodium benzoate, sodium acetate, sodium chloride, leucine, magnesium lauryl sulfate, sodium lauryl sulfate, etc., and combinations thereof.

[0433] Exemplary oils include, but are not limited to, almond, apricot kernel, avocado, babassu, bergamot, black current seed, borage, cade, camomile, canola, caraway, carnauba, castor, cinnamon, cocoa butter, coconut, cod liver, coffee, corn, cotton seed, emu, eucalyptus, evening primrose, fish, flaxseed, geraniol, gourd, grape seed, hazel nut, hyssop, isopropyl myristate, jojoba, kukui nut, lavandin, lavender, lemon, litsea cubeba, macademia nut, mallow, mango seed, meadowfoam seed, mink, nutmeg, olive, orange, orange roughy, palm, palm kernel, peach kernel, peanut, poppy seed, pumpkin seed, rapeseed, rice bran, rosemary, safflower, sandalwood, sasquana, savoury, sea buckthorn, sesame, shea butter, silicone, soybean, sunflower, tea tree, thistle, tsubaki, vetiver, walnut, and wheat germ oils. Exemplary oils include, but are not limited to, butyl stearate, caprylic triglyceride, capric triglyceride, cyclomethicone, diethyl sebacate, dimethicone 360, isopropyl myristate, mineral oil, octyldodecanol, oleyl alcohol, silicone oil, and/or combinations thereof.

[0434] Excipients such as cocoa butter and suppository waxes, coloring agents, coating agents, sweetening, flavoring, and/or perfuming agents can be present in the composition, according to the judgment of the formulator.

[0435] Exemplary additives include physiologically biocompatible buffers (e.g., trimethylamine hydrochloride), addition of chelants (such as, for example, DTPA or DTPA-bisamide) or calcium chelate complexes (as for example calcium DTPA, CaNaDTPA-bisamide), or, optionally, additions of calcium or sodium salts (for example, calcium chloride, calcium ascorbate, calcium gluconate or calcium lactate). In addition, antioxidants and suspending agents can be used.

### Cryoprotectants

[0436] In some embodiments, viral vector formulations may comprise cyroprotectants. As used herein, there term “cryoprotectant” refers to one or more agent that when combined with a given substance, helps to reduce or eliminate damage to that substance that occurs upon freezing. In some embodiments, cryoprotectants are combined with viral vectors in order to stabilize them during freezing. Frozen storage between −20° C. and −80° C. may be advantageous for long term (e.g. 36 months) stability of viral vectors. In some embodiments, cryoprotectants are included in viral vector formulations to stabilize them through freeze/thaw cycles and under frozen storage conditions. Cryoprotectants of the present invention may include, but are not limited to sucrose, trehalose, lactose, glycerol, dextrose, raffinose and/or mannitol. Trehalose is listed by the Food and Drug Administration as being generally regarded as safe (GRAS) and is commonly used in commercial pharmaceutical formulations.

### Bulking Agents

[0437] In some embodiments, viral vector formulations may comprise bulking agents. As used herein, ther term “bulking agent” refers to one or more agents included in formulations to impart a desired consistency to the formulation and/or stabilization of formulation components. In some embodiments, bulking agents are included in lyophilized viral vector formulations to yield a “pharmaceutically elegant” cake, stabilizing the lyophilized viral vectors during long term (e.g. 36 month) storage. Bulking agents of the present invention may include, but are not limited to sucrose, trehalose, mannitol, glycine, lactose and/or raffinose. In some embodiments, combinations of cryoprotectants and bulking agents (for example, sucrose/glycine or trehalose/mannitol) may be included to both stabilize viral vectors during freezing and provide a bulking agent for lyophilization.

### Inactive Ingredients

[0438] In some embodiments, chimeric polynucleotide formulations may comprise at least one excipient which is an inactive ingredient. As used herein, the term “inactive ingredient” refers to one or more inactive agents included in formulations. In some embodiments, all, none or some of the inactive ingredients which may be used in the formulations of the present invention may be approved by the US Food and Drug Administration (FDA).

[0439] Formulations of viral vectors disclosed herein may include cations or anions. In one embodiment, the formulations include metal cations such as, but not limited to, Zn2+, Ca2+, Cu2+, Mg+ and combinations thereof. As a non-limiting example, formulations may include polymers and a chimeric polynucleotides complexed with a metal cation (See e.g., U.S. Pat. Nos. 6,265,389 and 6,555,525, each of which is herein incorporated by reference in its entirety).

### Administration

[0440] The viral vectors of the present invention may be administered by any route which results in a therapeutically effective outcome. These include, but are not limited to enteral (into the intestine), gastroenteral, epidural (into the dura matter), oral (by way of the mouth), transdermal, peridural, intracerebral (into the cerebrum), intracerebroventricular (into the cerebral ventricles), epicutaneous (application onto the skin), intradermal, (into the skin itself), subcutaneous (under the skin), nasal administration (through the nose), intravenous (into a vein), intravenous bolus, intravenous drip, intraarterial (into an artery), intramuscular (into a muscle), intracardiac (into the heart), intraosseous infusion (into the bone marrow), intrathecal (into the spinal canal), intraperitoneal, (infusion or injection into the peritoneum), intravesical infusion, intravitreal, (through the eye), intracavernous injection (into a pathologic cavity) intracavitary (into the base of the penis), intravaginal administration, intrauterine, extra-amniotic administration, transdermal (diffusion through the intact skin for systemic distribution), transmucosal (diffusion through a mucous membrane), transvaginal, insufflation (snorting), sublingual, sublabial, enema, eye drops (onto the conjunctiva), in ear drops, auricular (in or by way of the ear), buccal (directed toward the cheek), conjunctival, cutaneous, dental (to a tooth or teeth), electro-osmosis, endocervical, endosinusial, endotracheal, extracorporeal, hemodialysis, infiltration, interstitial, intra-abdominal, intra-amniotic, intra-articular, intrabiliary, intrabronchial, intrabursal, intracartilaginous (within a cartilage), intracaudal (within the cauda equine), intracisternal (within the cisterna magna cerebellomedularis), intracorneal (within the cornea), dental intracornal, intracoronary (within the coronary arteries), intracorporus cavernosum (within the dilatable spaces of the corporus cavernosa of the penis), intradiscal (within a disc), intraductal (within a duct of a gland), intraduodenal (within the duodenum), intradural (within or beneath the dura), intraepidermal (to the epidermis), intraesophageal (to the esophagus), intragastric (within the stomach), intragingival (within the gingivae), intraileal (within the distal portion of the small intestine), intralesional (within or introduced directly to a localized lesion), intraluminal (within a lumen of a tube), intralymphatic (within the lymph), intramedullary (within the marrow cavity of a bone), intrameningeal (within the meninges), intraocular (within the eye), intraovarian (within the ovary), intrapericardial (within the pericardium), intrapleural (within the pleura), intraprostatic (within the prostate gland), intrapulmonary (within the lungs or its bronchi), intrasinal (within the nasal or periorbital sinuses), intraspinal (within the vertebral column), intrasynovial (within the synovial cavity of a joint), intratendinous (within a tendon), intratesticular (within the testicle), intrathecal (within the cerebrospinal fluid at any level of the cerebrospinal axis), intrathoracic (within the thorax), intratubular (within the tubules of an organ), intratumor (within a tumor), intratympanic (within the aurus media), intravascular (within a vessel or vessels), intraventricular (within a ventricle), iontophoresis (by means of electric current where ions of soluble salts migrate into the tissues of the body), irrigation (to bathe or flush open wounds or body cavities), laryngeal (directly upon the larynx), nasogastric (through the nose and into the stomach), occlusive dressing technique (topical route administration which is then covered by a dressing which occludes the area), ophthalmic (to the external eye), oropharyngeal (directly to the mouth and pharynx), parenteral, percutaneous, periarticular, peridural, perineural, periodontal, rectal, respiratory (within the respiratory tract by inhaling orally or nasally for local or systemic effect), retrobulbar (behind the pons or behind the eyeball), soft tissue, subarachnoid, subconjunctival, submucosal, topical, transplacental (through or across the placenta), transtracheal (through the wall of the trachea), transtympanic (across or through the tympanic cavity), ureteral (to the ureter), urethral (to the urethra), vaginal, caudal block, diagnostic, nerve block, biliary perfusion, cardiac perfusion, photopheresis or spinal. In specific embodiments, compositions may be administered in a way which allows them cross the blood-brain barrier, vascular barrier, or other epithelial barrier. In one embodiment, a formulation for a route of administration may include at least one inactive ingredient.

### Dosing

[0441] The present invention provides methods comprising administering viral vectors and their payload or complexes in accordance with the invention to a subject in need thereof. Viral vector pharmaceutical, imaging, diagnostic, or prophylactic compositions thereof, may be administered to a subject using any amount and any route of administration effective for preventing, treating, diagnosing, or imaging a disease, disorder, and/or condition (e.g., a disease, disorder, and/or condition relating to working memory deficits). The exact amount required will vary from subject to subject, depending on the species, age, and general condition of the subject, the severity of the disease, the particular composition, its mode of administration, its mode of activity, and the like. Compositions in accordance with the invention are typically formulated in unit dosage form for ease of administration and uniformity of dosage. It will be understood, however, that the total usage of the compositions of the present invention may be decided by the attending physician within the scope of sound medical judgment. The specific therapeutically effective, prophylactically effective, or appropriate imaging dose level for any particular patient will depend upon a variety of factors including the disorder being treated and the severity of the disorder; the activity of the specific compound employed; the specific composition employed; the age, body weight, general health, sex and diet of the patient; the time of administration, route of administration, and rate of excretion of the specific payload employed; the duration of the treatment; drugs used in combination or coincidental with the specific compound employed; and like factors well known in the medical arts.

[0442] In certain embodiments, viral vector pharmaceutical compositions in accordance with the present invention may be administered at dosage levels sufficient to deliver from about 0.0001 mg/kg to about 100 mg/kg, from about 0.001 mg/kg to about 0.05 mg/kg, from about 0.005 mg/kg to about 0.05 mg/kg, from about 0.001 mg/kg to about 0.005 mg/kg, from about 0.05 mg/kg to about 0.5 mg/kg, from about 0.01 mg/kg to about 50 mg/kg, from about 0.1 mg/kg to about 40 mg/kg, from about 0.5 mg/kg to about 30 mg/kg, from about 0.01 mg/kg to about 10 mg/kg, from about 0.1 mg/kg to about 10 mg/kg, or from about 1 mg/kg to about 25 mg/kg, of subject body weight per day, one or more times a day, to obtain the desired therapeutic, diagnostic, prophylactic, or imaging effect (see e.g., the range of unit doses described in International Publication No WO2013078199, herein incorporated by reference in its entirety). In certain embodiments, the desired dosage may be delivered using multiple administrations (e.g., two, three, four, five, six, seven, eight, nine, ten, eleven, twelve, thirteen, fourteen, or more administrations). When multiple administrations are employed, split dosing regimens such as those described herein may be used. As used herein, a “split dose” is the division of single unit dose or total daily dose into two or more doses, e.g, two or more administrations of the single unit dose. As used herein, a “single unit dose” is a dose of any therapeutic administered in one dose/at one time/single route/single point of contact, i.e., single administration event. As used herein, a “total daily dose” is an amount given or prescribed in 24 hr period. It may be administered as a single unit dose. In one embodiment, the viral vectors of the present invention are administered to a subject in split doses. The viral vectors may be formulated in buffer only or in a formulation described herein.

[0443] A pharmaceutical composition described herein can be formulated into a dosage form described herein, such as a topical, intranasal, pulmonary, intratracheal, or injectable (e.g., intravenous, intraocular, intravitreal, intramuscular, intracardiac, intraperitoneal, subcutaneous).

### Combinations

[0444] The viral vectors may be used in combination with one or more other therapeutic, prophylactic, diagnostic, or imaging agents. By “in combination with,” it is not intended to imply that the agents must be administered at the same time and/or formulated for delivery together, although these methods of delivery are within the scope of the present disclosure. Compositions can be administered concurrently with, prior to, or subsequent to, one or more other desired therapeutics or medical procedures. In general, each agent will be administered at a dose and/or on a time schedule determined for that agent. In some embodiments, the present disclosure encompasses the delivery of pharmaceutical, prophylactic, diagnostic, or imaging compositions in combination with agents that may improve their bioavailability, reduce and/or modify their metabolism, inhibit their excretion, and/or modify their distribution within the body.

### Delivery Methods

[0445] In one embodiment, the viral vector may be administered or delivered using the methods for the delivery of AAV virions described in European Patent Application No. EP1857552, the contents of which are herein incorporated by reference in its entirety.

[0446] In one embodiment, the viral vector may be administered or delivered using the methods for delivering proteins using AAV vectors described in European Patent Application No. EP2678433, the contents of which are herein incorporated by reference in its entirety.

[0447] In one embodiment, the viral vector may be administered or delivered using the methods for delivering DNA molecules using AAV vectors described in U.S. Pat. No. 5,858,351, the contents of which are herein incorporated by reference in its entirety.

[0448] In one embodiment, the viral vector may be administered or delivered using the methods for delivering DNA to the bloodstream described in U.S. Pat. No. 6,211,163, the contents of which are herein incorporated by reference in its entirety.

[0449] In one embodiment, the viral vector may be administered or delivered using the methods for delivering AAV virions described in U.S. Pat. No. 6,325,998, the contents of which are herein incorporated by reference in its entirety.

[0450] In one embodiment, the viral vector may be administered or delivered using the methods for delivering DNA to muscle cells described in U.S. Pat. No. 6,335,011, the contents of which are herein incorporated by reference in its entirety.

[0451] In one embodiment, the viral vector may be administered or delivered using the methods for delivering DNA to muscle cells and tissues described in U.S. Pat. No. 6,610,290, the contents of which are herein incorporated by reference in its entirety.

[0452] In one embodiment, the viral vector may be administered or delivered using the methods for delivering DNA to muscle cells described in U.S. Pat. No. 7,704,492, the contents of which are herein incorporated by reference in its entirety.

[0453] In one embodiment, the viral vector may be administered or delivered using the methods for delivering a payload to skeletal muscles described in U.S. Pat. No. 7,112,321, the contents of which are herein incorporated by reference in its entirety.

[0454] In one embodiment, the viral vector may be administered or delivered using the methods for delivering a payload to the central nervous system described in U.S. Pat. No. 7,588,757, the contents of which are herein incorporated by reference in its entirety.

[0455] In one embodiment, the viral vector may be administered or delivered using the methods for delivering a payload described in U.S. Pat. No. 8,283,151, the contents of which are herein incorporated by reference in its entirety.

[0456] In one embodiment, the viral vector may be administered or delivered using the methods for delivering a payload for the treatment of Alzheimer disease described in U.S. Pat. No. 8,318,687, the contents of which are herein incorporated by reference in its entirety.

[0457] In one embodiment, the viral vector may be administered or delivered using the methods for delivering a payload described in International Patent Publication No. WO2012144446, the contents of which are herein incorporated by reference in its entirety.

[0458] In one embodiment, the viral vector may be administered or delivered using the methods for delivering a payload using a glutamic acid decarboxylase (GAD) delivery vector described in International Patent Publication No. WO2001089583, the contents of which are herein incorporated by reference in its entirety.

[0459] In one embodiment, the viral vector may be administered or delivered using the methods for delivering a payload described in International Patent Publication No. WO2001096587, the contents of which are herein incorporated by reference in its entirety.

[0460] In one embodiment, the viral vector may be administered or delivered using the methods for delivering a payload to muscle tissue described in International Patent Publication No. WO2002014487, the contents of which are herein incorporated by reference in its entirety.

[0461] In one embodiment, the viral vector may be administered or delivered using the methods for delivering a payload to neural cells described in International Patent Publication No. WO2012057363, the contents of which are herein incorporated by reference in its entirety.

[0462] The pharmaceutical compositions of viral vectors described herein may be characterized by one or more of bioavailability, therapeutic window and/or volume of distribution.

### Bioavailability

[0463] Viral vectors of the present invention, when formulated into compositions with delivery/formulation agents or vehicles as described herein, may exhibit increased bioavailability as compared to compositions lacking delivery agents as described herein. As used herein, the term “bioavailability” refers to the systemic availability of a given amount of a particular agent administered to a subject. Bioavailability may be assessed by measuring the area under the curve (AUC) or the maximum serum or plasma concentration (Cₘₐₓ) of the unchanged form of a compound following administration of the compound to a mammal. AUC is a determination of the area under the curve plotting the serum or plasma concentration of a compound along the ordinate (Y-axis) against time along the abscissa (X-axis). Generally, the AUC for a particular compound may be calculated using methods known to those of ordinary skill in the art and as described in G. S. Banker, Modern Pharmaceutics, Drugs and the Pharmaceutical Sciences, v. 72, Marcel Dekker, New York, Inc., 1996, the contents of which are herein incorporated by reference in their entirety.

[0464] Cₘₐₓ values are maximum concentrations of compounds achieved in serum or plasma of a subject following administration of compounds to the subject. Cₘₐₓ values of particular compounds may be measured using methods known to those of ordinary skill in the art. As used herein, the phrases “increasing bioavailability” or “improving the pharmacokinetics,” refer to actions that may increase the systemic availability of a viral vector of the present invention (as measured by AUC, Cₘₐₓ, or Cₘᵢₙ) in a subject. In some embodiments, such actions may comprise co-administration with one or more delivery agents as described herein. In some embodiments, the bioavailability of viral vectors may increase by at least about 2%, at least about 5%, at least about 10%, at least about 15%, at least about 20%, at least about 25%, at least about 30%, at least about 35%, at least about 40%, at least about 45%, at least about 50%, at least about 55%, at least about 60%, at least about 65%, at least about 70%, at least about 75%, at least about 80%, at least about 85%, at least about 90%, at least about 95% or about 100%.

### Therapeutic Window

[0465] Viral vectors of the present invention, when formulated with one or more delivery agents as described herein, may exhibit increases in the therapeutic window of compound and/or composition administration as compared to the therapeutic window of viral vectors administered without one or more delivery agents as described herein. As used herein, the term “therapeutic window” refers to the range of plasma concentrations, or the range of levels of therapeutically active substance at the site of action, with a high probability of eliciting a therapeutic effect. In some embodiments, therapeutic windows of viral vectors when administered in a formulation may increase by at least about 2%, at least about 5%, at least about 10%, at least about 15%, at least about 20%, at least about 25%, at least about 30%, at least about 35%, at least about 40%, at least about 45%, at least about 50%, at least about 55%, at least about 60%, at least about 65%, at least about 70%, at least about 75%, at least about 80%, at least about 85%, at least about 90%, at least about 95% or about 100%.

### Volume of Distribution

[0466] Viral vectors of the present invention, when formulated with one or more delivery agents as described herein, may exhibit an improved volume of distribution (V_{dist}), e.g., reduced or targeted, relative to formulations lacking one or more delivery agents as described herein. V_{dist} relates the amount of an agent in the body to the concentration of the same agent in the blood or plasma. As used herein, the term “volume of distribution” refers to the fluid volume that would be required to contain the total amount of an agent in the body at the same concentration as in the blood or plasma: V_{dist} equals the amount of an agent in the body/concentration of the agent in blood or plasma. For example, for a 10 mg dose of a given agent and a plasma concentration of 10 mg/L, the volume of distribution would be 1 liter. The volume of distribution reflects the extent to which an agent is present in the extravascular tissue. Large volumes of distribution reflect the tendency of agents to bind to the tissue components as compared with plasma proteins. In clinical settings, V_{dist} may be used to determine loading doses to achieve steady state concentrations. In some embodiments, volumes of distribution of viral vector compositions of the present invention when co-administered with one or more delivery agents as described herein may decrease at least about 2%, at least about 5%, at least about 10%, at least about 15%, at least about 20%, at least about 25%, at least about 30%, at least about 35%, at least about 40%, at least about 45%, at least about 50%, at least about 55%, at least about 60%, at least about 65%, at least about 70%.

### Kits and Devices

[0467] The invention provides a variety of kits for conveniently and/or effectively carrying out methods of the present invention. Typically kits will comprise sufficient amounts and/or numbers of components to allow a user to perform multiple treatments of a subject(s) and/or to perform multiple experiments.

[0468] In one aspect, the present invention provides kits comprising the molecules (viral vectors) of the invention. In one embodiment, the kit comprises one or more functional antibodies or function fragments thereof.

[0469] Said kits can be for viral vector production. The kit may further comprise packaging and instructions and/or a delivery agent to form a formulation composition. The delivery agent may comprise a saline, a buffered solution, or any delivery agent disclosed herein.

[0470] In one embodiment, the buffer solution may include sodium chloride, calcium chloride, phosphate and/or EDTA. In another embodiment, the buffer solution may include, but is not limited to, saline, saline with 2 mM calcium, 5% sucrose, 5% sucrose with 2 mM calcium, 5% Mannitol, 5% Mannitol with 2 mM calcium, Ringer's lactate, sodium chloride, sodium chloride with 2 mM calcium and mannose (See e.g., U.S. Pub. No. 20120258046; the contents of which are herein incorporated by reference in its entirety). In a further embodiment, the buffer solutions may be precipitated or it may be lyophilized. The amount of each component may be varied to enable consistent, reproducible higher concentration saline or simple buffer formulations. The components may also be varied in order to increase the stability of the viral vector or any expression construct taught herein in the buffer solution over a period of time and/or under a variety of conditions.

[0471] In one aspect, the present invention provides kits for viral vector production, comprising: an expression vector and a payload construct vector provided in an amount effective to produce a desired amount of a viral vector when introduced into a target cell and packaging and instructions.

[0472] Any of the vectors, constructs, polynucleotides or polypeptides of the present invention may be comprised in a kit. In some embodiments, kits may further include reagents and/or instructions for creating and/or synthesizing compounds and/or compositions of the present invention. In some embodiments, kits may also include one or more buffers. In some embodiments, kits of the invention may include components for making protein or nucleic acid arrays or libraries and thus, may include, for example, solid supports.

[0473] In some embodiments, kit components may be packaged either in aqueous media or in lyophilized form. The container means of the kits will generally include at least one vial, test tube, flask, bottle, syringe or other container means, into which a component may be placed, and preferably, suitably aliquotted. Where there are more than one kit component, (labeling reagent and label may be packaged together), kits may also generally contain second, third or other additional containers into which additional components may be separately placed. In some embodiments, kits may also comprise second container means for containing sterile, pharmaceutically acceptable buffers and/or other diluents. In some embodiments, various combinations of components may be comprised in one or more vial. Kits of the present invention may also typically include means for containing compounds and/or compositions of the present invention, e.g., proteins, nucleic acids, and any other reagent containers in close confinement for commercial sale. Such containers may include injection or blow-molded plastic containers into which desired vials are retained.

[0474] In some embodiments, kit components are provided in one and/or more liquid solutions. In some embodiments, liquid solutions are aqueous solutions, with sterile aqueous solutions being particularly preferred. In some embodiments, kit components may be provided as dried powder(s). When reagents and/or components are provided as dry powders, such powders may be reconstituted by the addition of suitable volumes of solvent. In some embodiments, it is envisioned that solvents may also be provided in another container means. In some embodiments, labeling dyes are provided as dried powders. In some embodiments, it is contemplated that 10, 20, 30, 40, 50, 60, 70, 80, 90, 100, 120, 120, 130, 140, 150, 160, 170, 180, 190, 200, 300, 400, 500, 600, 700, 800, 900, 1000 micrograms or at least or at most those amounts of dried dye are provided in kits of the invention. In such embodiments, dye may then be resuspended in any suitable solvent, such as DMSO.

[0475] In some embodiments, kits may include instructions for employing kit components as well the use of any other reagent not included in the kit. Instructions may include variations that may be implemented.

### Devices

[0476] In some embodiments, compounds and/or compositions of the present invention may be combined with, coated onto or embedded in a device. Devices may include, but are not limited to, dental implants, stents, bone replacements, artificial joints, valves, pacemakers and/or other implantable therapeutic device.

[0477] The present invention provides for devices which may incorporate viral vectors that encode one or more payload molecules. These devices contain in a stable formulation the viral vectors which may be immediately delivered to a subject in need thereof, such as a human patient.

[0478] Devices for administration may be employed to deliver the viral vectors of the present invention according to single, multi- or split-dosing regimens taught herein.

[0479] Method and devices known in the art for multi-administration to cells, organs and tissues are contemplated for use in conjunction with the methods and compositions disclosed herein as embodiments of the present invention. These include, for example, those methods and devices having multiple needles, hybrid devices employing for example lumens or catheters as well as devices utilizing heat, electric current or radiation driven mechanisms.

[0480] In one embodiment, the chimeric polynucleotide is administered subcutaneously or intramuscularly via at least 3 needles to three different, optionally adjacent, sites simultaneously, or within a 60 minutes period (e.g., administration to 4,5, 6, 7, 8, 9, or 10 sites simultaneously or within a 60 minute period).

### VI. DEFINITIONS

[0481] At various places in the present specification, substituents of compounds of the present disclosure are disclosed in groups or in ranges. It is specifically intended that the present disclosure include each and every individual subcombination of the members of such groups and ranges. The following is a non-limiting list of term definitions.

[0482] Activity: As used herein, the term “activity” refers to the condition in which things are happening or being done. Compositions of the invention may have activity and this activity may involve one or more biological events.

[0483] Administered in combination: As used herein, the term “administered in combination” or “combined administration” refers to simultaneous exposure of one or more subjects to two or more agents administered at the same time or within an interval such that the subject is at some point in time simultaneously exposed to both and/or such that there may be an overlap in the effect of each agent on the patient. In some embodiments, at least one dose of one or more agents is administered within about 24 hours, 12 hours, 6 hours, 3 hours, 1 hour, 30 minutes, 15 minutes, 10 minutes, 5 minutes, or 1 minute of at least one dose of one or more other agents. In some embodiments, administration occurs in overlapping dosage regimens. As used herein, the term “dosage regimen” refers to a plurality of doses spaced apart in time. Such doses may occur at regular intervals or may include one or more hiatus in administration. In some embodiments, the administration of individual doses of one or more compounds and/or compositions of the present invention, as described herein, are spaced sufficiently closely together such that a combinatorial (e.g., a synergistic) effect is achieved.

[0484] Animal: As used herein, the term “animal” refers to any member of the animal kingdom. In some embodiments, “animal” refers to humans at any stage of development. In some embodiments, “animal” refers to non-human animals at any stage of development. In certain embodiments, the non-human animal is a mammal (e.g., a rodent, a mouse, a rat, a rabbit, a monkey, a dog, a cat, a sheep, cattle, a primate, or a pig). In some embodiments, animals include, but are not limited to, mammals, birds, reptiles, amphibians, fish, and worms. In some embodiments, the animal is a transgenic animal, genetically-engineered animal, or a clone.

[0485] Approximately: As used herein, the term “approximately” or “about,” as applied to one or more values of interest, refers to a value that is similar to a stated reference value. In certain embodiments, the term “approximately” or “about” refers to a range of values that fall within 25%, 20%, 19%, 18%, 17%, 16%, 15%, 14%, 13%, 12%, 11%, 10%, 9%, 8%, 7%, 6%, 5%, 4%, 3%, 2%, 1%, or less in either direction (greater than or less than) of the stated reference value unless otherwise stated or otherwise evident from the context (except where such number would exceed 100% of a possible value).

[0486] Associated with: As used herein, the terms “associated with,” “conjugated,” “linked,” “attached,” and “tethered,” when used with respect to two or more moieties, mean that the moieties are physically associated or connected with one another, either directly or via one or more additional moieties that serve as linking agents, to form a structure that is sufficiently stable so that the moieties remain physically associated under the conditions in which the structure is used, e.g., physiological conditions. An “association” need not be strictly through direct covalent chemical bonding. It may also suggest ionic or hydrogen bonding or a hybridization based connectivity sufficiently stable such that the “associated” entities remain physically associated.

[0487] Biomolecule: As used herein, the term “biomolecule” is any natural molecule which is amino acid-based, nucleic acid-based, carbohydrate-based or lipid-based, and the like.

[0488] Biologically active: As used herein, the phrase “biologically active” refers to a characteristic of any substance that has activity in or on a biological system and/or organism. For instance, a substance that, when administered to an organism, has a biological effect on that organism, is considered to be biologically active. In particular embodiments, a compounds and/or compositions of the present invention may be considered biologically active if even a portion of is biologically active or mimics an activity considered to biologically relevant.

[0489] Biological system: As used herein, the term “biological system” refers to a group of organs, tissues, cells, intracellular components, proteins, nucleic acids, molecules (including, but not limited to biomolecules) that function together to perform a certain biological task within cellular membranes, cellular compartments, cells, tissues, organs, organ systems, multicellular organisms, or any biological entity. In some embodiments, biological systems are cell signaling pathways comprising intracellular and/or extracellular cell signaling biomolecules. In some embodiments, biological systems comprise growth factor signaling events within the extracellular/cellular matrix and/or cellular niches.

[0490] Compound: As used herein, the term “compound,” refers to a distinct chemical entity. In some embodiments, a particular compound may exist in one or more isomeric or isotopic forms (including, but not limited to stereoisomers, geometric isomers and isotopes). In some embodiments, a compound is provided or utilized in only a single such form. In some embodiments, a compound is provided or utilized as a mixture of two or more such forms (including, but not limited to a racemic mixture of stereoisomers). Those of skill in the art appreciate that some compounds exist in different such forms, show different properties and/or activities (including, but not limited to biological activities). In such cases it is within the ordinary skill of those in the art to select or avoid particular forms of the compound for use in accordance with the present invention. For example, compounds that contain asymmetrically substituted carbon atoms can be isolated in optically active or racemic forms. Methods on how to prepare optically active forms from optically active starting materials are known in the art, such as by resolution of racemic mixtures or by stereoselective synthesis.

[0491] Conserved: As used herein, the term “conserved” refers to nucleotides or amino acid residues of polynucleotide or polypeptide sequences, respectively, that are those that occur unaltered in the same position of two or more sequences being compared. Nucleotides or amino acids that are relatively conserved are those that are conserved among more related sequences than nucleotides or amino acids appearing elsewhere in the sequences.

[0492] In some embodiments, two or more sequences are said to be “completely conserved” if they are 100% identical to one another. In some embodiments, two or more sequences are said to be “highly conserved” if they are at least 70% identical, at least 80% identical, at least 90% identical, or at least 95% identical to one another. In some embodiments, two or more sequences are said to be “highly conserved” if they are about 70% identical, about 80% identical, about 90% identical, about 95%, about 98%, or about 99% identical to one another. In some embodiments, two or more sequences are said to be “conserved” if they are at least 30% identical, at least 40% identical, at least 50% identical, at least 60% identical, at least 70% identical, at least 80% identical, at least 90% identical, or at least 95% identical to one another. In some embodiments, two or more sequences are said to be “conserved” if they are about 30% identical, about 40% identical, about 50% identical, about 60% identical, about 70% identical, about 80% identical, about 90% identical, about 95% identical, about 98% identical, or about 99% identical to one another. Conservation of sequence may apply to the entire length of an oligonucleotide or polypeptide or may apply to a portion, region or feature thereof.

[0493] In one embodiment, conserved sequences are not contiguous. Those skilled in the art are able to appreciate how to achieve alignment when gaps in contiguous alignment are present between sequences, and to align corresponding residues not withstanding insertions or deletions present.

[0494] Delivery: As used herein, “delivery” refers to the act or manner of delivering a compound, substance, entity, moiety, cargo or payload to a target. Such target may be a cell, tissue, organ, organism, or system (whether biological or production).

[0495] Delivery Agent: As used herein, “delivery agent” refers to any agent which facilitates, at least in part, the in vivo delivery of one or more substances (including, but not limited to a compounds and/or compositions of the present invention, e.g., viral vectors or expression vectors) to targeted cells.

[0496] Destabilized: As used herein, the term “destable,” “destabilize,” or “destabilizing region” means a region or molecule that is less stable than a starting, reference, wild-type or native form of the same region or molecule.

[0497] Detectable label: As used herein, “detectable label” refers to one or more markers, signals, or moieties which are attached, incorporated or associated with another entity, which markers, signals or moieties are readily detected by methods known in the art including radiography, fluorescence, chemiluminescence, enzymatic activity, absorbance, immunological detection and the like. Detectable labels may include radioisotopes, fluorophores, chromophores, enzymes, dyes, metal ions, ligands, biotin, avidin, streptavidin and haptens, quantum dots, polyhistidine tags, myc tags, flag tags, human influenza hemagglutinin (HA) tags and the like. Detectable labels may be located at any position in the entity with which they are attached, incorporated or associated. For example, when attached, incorporated in or associated with a peptide or protein, they may be within the amino acids, the peptides, or proteins, or located at the N- or C-termini.

[0498] Distal: As used herein, the term “distal” means situated away from the center or away from a point or region of interest.

[0499] Engineered: As used herein, embodiments of the invention are “engineered” when they are designed to have a feature or property, whether structural or chemical, that varies from a starting point, wild type or native molecule. Thus, engineered agents or entities are those whose design and/or production include an act of the hand of man.

[0500] Epitope: As used herein, an “epitope” refers to a surface or region on a molecule that is capable of interacting with a biomolecule. For example a protein may contain one or more amino acids, e.g., an epitope, which interacts with an antibody, e.g., a biomolecule. In some embodiments, when referring to a protein or protein module, an epitope may comprise a linear stretch of amino acids or a three dimensional structure formed by folded amino acid chains.

[0501] Expression: As used herein, “expression” of a nucleic acid sequence refers to one or more of the following events: (1) production of an RNA template from a DNA sequence (e.g., by transcription); (2) processing of an RNA transcript (e.g., by splicing, editing, 5′ cap formation, and/or 3′ end processing); (3) translation of an RNA into a polypeptide or protein; (4) folding of a polypeptide or protein; and (5) post-translational modification of a polypeptide or protein.

[0502] Feature: As used herein, a “feature” refers to a characteristic, a property, or a distinctive element.

[0503] Formulation: As used herein, a “formulation” includes at least a compound and/or composition of the present invention and a delivery agent.

[0504] Fragment: A “fragment,” as used herein, refers to a contiguous portion of a whole. For example, fragments of proteins may comprise polypeptides obtained by digesting full-length protein isolated from cultured cells. In some embodiments, a fragment of a protein includes at least 3, 4, 5, 6, 7, 8, 9, 10, 11, 12, 13, 14, 15, 16, 17, 18, 19, 20, 25, 30, 35, 40, 45, 50, 55, 60, 65, 70, 75, 80, 85, 90, 95, 100, 150, 200, 250 or more amino acids. In some embodiments, fragments of an antibody include portions of an antibody subjected to enzymatic digestion or synthesized as such.

[0505] Functional: As used herein, a “functional” biological molecule is a biological entity with a structure and in a form in which it exhibits a property and/or activity by which it is characterized.

[0506] Homology: As used herein, the term “homology” refers to the overall relatedness between polymeric molecules, e.g. between nucleic acid molecules (e.g. DNA molecules and/or RNA molecules) and/or between polypeptide molecules. In some embodiments, polymeric molecules are considered to be “homologous” to one another if their sequences are at least 25%, 30%, 35%, 40%, 45%, 50%, 55%, 60%, 65%, 70%, 75%, 80%, 85%, 90%, 95%, or 99% identical or similar. The term “homologous” necessarily refers to a comparison between at least two sequences (polynucleotide or polypeptide sequences). In accordance with the invention, two polynucleotide sequences are considered to be homologous if the polypeptides they encode are at least about 50%, 60%, 70%, 80%, 90%, 95%, or even 99% for at least one stretch of at least about 20 amino acids. In some embodiments, homologous polynucleotide sequences are characterized by the ability to encode a stretch of at least 4-5 uniquely specified amino acids. For polynucleotide sequences less than 60 nucleotides in length, homology is typically determined by the ability to encode a stretch of at least 4-5 uniquely specified amino acids. In accordance with the invention, two protein sequences are considered to be homologous if the proteins are at least about 50%, 60%, 70%, 80%, or 90% identical for at least one stretch of at least about 20 amino acids. In many embodiments, homologous protein may show a large overall degree of homology and a high degree of homology over at least one short stretch of at least 3, 4, 5, 6, 7, 8, 9, 10, 11, 12, 13, 14, 15, 16, 17, 18, 19, 20, 25, 30, 35, 40, 45, 50 or more amino acids. In many embodiments, homologous proteins share one or more characteristic sequence elements. As used herein, the term “characteristic sequence element” refers to a motif present in related proteins. In some embodiments, the presence of such motifs correlates with a particular activity (such as biological activity).

[0507] Identity: As used herein, the term “identity” refers to the overall relatedness between polymeric molecules, e.g., between oligonucleotide molecules (e.g. DNA molecules and/or RNA molecules) and/or between polypeptide molecules. Calculation of the percent identity of two polynucleotide sequences, for example, may be performed by aligning the two sequences for optimal comparison purposes (e.g., gaps can be introduced in one or both of a first and a second nucleic acid sequences for optimal alignment and non-identical sequences can be disregarded for comparison purposes). In certain embodiments, the length of a sequence aligned for comparison purposes is at least 30%, at least 40%, at least 50%, at least 60%, at least 70%, at least 80%, at least 90%, at least 95%, or 100% of the length of the reference sequence. The nucleotides at corresponding nucleotide positions are then compared. When a position in the first sequence is occupied by the same nucleotide as the corresponding position in the second sequence, then the molecules are identical at that position. The percent identity between the two sequences is a function of the number of identical positions shared by the sequences, taking into account the number of gaps, and the length of each gap, which needs to be introduced for optimal alignment of the two sequences. The comparison of sequences and determination of percent identity between two sequences can be accomplished using a mathematical algorithm. For example, the percent identity between two nucleotide sequences can be determined using methods such as those described in Computational Molecular Biology, Lesk, A. M., ed., Oxford University Press, New York, 1988; Biocomputing: Informatics and Genome Projects, Smith, D. W., ed., Academic Press, New York, 1993; Sequence Analysis in Molecular Biology, von Heinje, G., Academic Press, 1987; Computer Analysis of Sequence Data, Part I, Griffin, A. M., and Griffin, H. G., eds., Humana Press, New Jersey, 1994; and Sequence Analysis Primer, Gribskov, M. and Devereux, J., eds., M Stockton Press, New York, 1991; each of which is incorporated herein by reference. For example, the percent identity between two nucleotide sequences can be determined, for example using the algorithm of Meyers and Miller (CABIOS, 1989, 4:11-17), which has been incorporated into the ALIGN program (version 2.0) using a PAM120 weight residue table, a gap length penalty of 12 and a gap penalty of 4. The percent identity between two nucleotide sequences can, alternatively, be determined using the GAP program in the GCG software package using an NWSgapdna.CMP matrix. Methods commonly employed to determine percent identity between sequences include, but are not limited to those disclosed in Carillo, H., and Lipman, D., SIAM J Applied Math., 48:1073 (1988); incorporated herein by reference. Techniques for determining identity are codified in publicly available computer programs. Exemplary computer software to determine homology between two sequences include, but are not limited to, GCG program package, Devereux, J., et al., Nucleic Acids Research, 12(1), 387 (1984)), BLASTP, BLASTN, and FASTA Altschul, S. F. et al., J. Molec. Biol., 215, 403 (1990)).

[0508] Inhibit expression of a gene: As used herein, the phrase “inhibit expression of a gene” means to cause a reduction in the amount of an expression product of the gene. The expression product may be RNA transcribed from the gene (e.g. mRNA) or a polypeptide translated from mRNA transcribed from the gene. Typically a reduction in the level of mRNA results in a reduction in the level of a polypeptide translated therefrom. The level of expression may be determined using standard techniques for measuring mRNA or protein.

[0509] In vitro: As used herein, the term “in vitro” refers to events that occur in an artificial environment, e.g., in a test tube or reaction vessel, in cell culture, in a Petri dish, etc., rather than within an organism (e.g., animal, plant, or microbe).

[0510] In vivo: As used herein, the term “in vivo” refers to events that occur within an organism (e.g., animal, plant, or microbe or cell or tissue thereof).

[0511] Isolated: As used herein, the term “isolated” is synonymous with “separated”, but carries with it the inference separation was carried out by the hand of man. In one embodiment, an isolated substance or entity is one that has been separated from at least some of the components with which it was previously associated (whether in nature or in an experimental setting). Isolated substances may have varying levels of purity in reference to the substances from which they have been associated. Isolated substances and/or entities may be separated from at least about 10%, about 20%, about 30%, about 40%, about 50%, about 60%, about 70%, about 80%, about 90%, or more of the other components with which they were initially associated. In some embodiments, isolated agents are more than about 80%, about 85%, about 90%, about 91%, about 92%, about 93%, about 94%, about 95%, about 96%, about 97%, about 98%, about 99%, or more than about 99% pure. As used herein, a substance is “pure” if it is substantially free of other components.

[0512] Substantially isolated: By “substantially isolated” is meant that the compound is substantially separated from the environment in which it was formed or detected. Partial separation can include, for example, a composition enriched in the compound of the present disclosure. Substantial separation can include compositions containing at least about 50%, at least about 60%, at least about 70%, at least about 80%, at least about 90%, at least about 95%, at least about 97%, or at least about 99% by weight of the compound of the present disclosure, or salt thereof. Methods for isolating compounds and their salts are routine in the art. In some embodiments, isolation of a substance or entity includes disruption of chemical associations and/or bonds. In some embodiments, isolation includes only the separation from components with which the isolated substance or entity was previously combined and does not include such disruption.

[0513] Linker: As used herein, a linker refers to a moiety that connects two or more domains, moieties or entities. In one embodiment, a linker may comprise 10 or more atoms. In a further embodiment, a linker may comprise a group of atoms, e.g., 10-1,000 atoms, and can be comprised of the atoms or groups such as, but not limited to, carbon, amino, alkylamino, oxygen, sulfur, sulfoxide, sulfonyl, carbonyl, and imine. In some embodiments, a linker may comprise one or more nucleic acids comprising one or more nucleotides. In some embodiments, the linker may comprise an amino acid, peptide, polypeptide or protein. In some embodiments, a moiety bound by a linker may include, but is not limited to an atom, a chemical group, a nucleoside, a nucleotide, a nucleobase, a sugar, a nucleic acid, an amino acid, a peptide, a polypeptide, a protein, a protein complex, a payload (e.g., a therapeutic agent). or a marker (including, but not limited to a chemical, fluorescent, radioactive or bioluminescent marker). The linker can be used for any useful purpose, such as to form multimers or conjugates, as well as to administer a payload, as described herein. Examples of chemical groups that can be incorporated into the linker include, but are not limited to, alkyl, alkenyl, alkynyl, amido, amino, ether, thioether, ester, alkylene, heteroalkylene, aryl, or heterocyclyl, each of which can be optionally substituted, as described herein. Examples of linkers include, but are not limited to, unsaturated alkanes, polyethylene glycols (e.g., ethylene or propylene glycol monomeric units, e.g., diethylene glycol, dipropylene glycol, triethylene glycol, tripropylene glycol, tetraethylene glycol, or tetraethylene glycol), and dextran polymers, Other examples include, but are not limited to, cleavable moieties within the linker, such as, for example, a disulfide bond (—S—S—) or an azo bond (—N═N—), which can be cleaved using a reducing agent or photolysis. Non-limiting examples of a selectively cleavable bonds include an amido bond which may be cleaved for example by the use of tris(2-carboxyethyl)phosphine (TCEP), or other reducing agents, and/or photolysis, as well as an ester bond which may be cleaved for example by acidic or basic hydrolysis.

[0514] Modified: As used herein, the term “modified” refers to a changed state or structure of a molecule or entity as compared with a parent or reference molecule or entity. Molecules may be modified in many ways including chemically, structurally, and functionally. In some embodiments, compounds and/or compositions of the present invention are modified by the introduction of non-natural amino acids.

[0515] Mutation: As used herein, the term “mutation” refers to a change and/or alteration. In some embodiments, mutations may be changes and/or alterations to proteins (including peptides and polypeptides) and/or nucleic acids (including polynucleic acids). In some embodiments, mutations comprise changes and/or alterations to a protein and/or nucleic acid sequence. Such changes and/or alterations may comprise the addition, substitution and or deletion of one or more amino acids (in the case of proteins and/or peptides) and/or nucleotides (in the case of nucleic acids and or polynucleic acids). In embodiments wherein mutations comprise the addition and/or substitution of amino acids and/or nucleotides, such additions and/or substitutions may comprise 1 or more amino acid and/or nucleotide residues and may include modified amino acids and/or nucleotides.

[0516] Naturally occurring: As used herein, “naturally occurring” means existing in nature without artificial aid, or involvement of the hand of man.

[0517] Non-human vertebrate: As used herein, a “non-human vertebrate” includes all vertebrates except Homo sapiens, including wild and domesticated species. Examples of non-human vertebrates include, but are not limited to, mammals, such as alpaca, banteng, bison, camel, cat, cattle, deer, dog, donkey, gayal, goat, guinea pig, horse, llama, mule, pig, rabbit, reindeer, sheep water buffalo, and yak.

[0518] Off-target: As used herein, “off target” refers to any unintended effect on any one or more target, gene and/or cellular transcript.

[0519] Operably linked: As used herein, the phrase “operably linked” refers to a functional connection between two or more molecules, constructs, transcripts, entities, moieties or the like.

[0520] Patient: As used herein, “patient” refers to a subject who may seek or be in need of treatment, requires treatment, is receiving treatment, will receive treatment, or a subject who is under care by a trained (e.g., licensed) professional for a particular disease or condition.

[0521] Peptide: As used herein, the term “peptide” refers to a chain of amino acids that is less than or equal to about 50 amino acids long, e.g., about 5, 10, 15, 20, 25, 30, 35, 40, 45, or 50 amino acids long.

[0522] Pharmaceutically acceptable: The phrase “pharmaceutically acceptable” is employed herein to refer to those compounds, materials, compositions, and/or dosage forms which are, within the scope of sound medical judgment, suitable for use in contact with the tissues of human beings and animals without excessive toxicity, irritation, allergic response, or other problem or complication, commensurate with a reasonable benefit/risk ratio.

[0523] Pharmaceutically acceptable excipients: As used herein, the term “pharmaceutically acceptable excipient,” as used herein, refers to any ingredient other than active agents (e.g., as described herein) present in pharmaceutical compositions and having the properties of being substantially nontoxic and non-inflammatory in subjects. In some embodiments, pharmaceutically acceptable excipients are vehicles capable of suspending and/or dissolving active agents. Excipients may include, for example: antiadherents, antioxidants, binders, coatings, compression aids, disintegrants, dyes (colors), emollients, emulsifiers, fillers (diluents), film formers or coatings, flavors, fragrances, glidants (flow enhancers), lubricants, preservatives, printing inks, sorbents, suspending or dispersing agents, sweeteners, and waters of hydration. Exemplary excipients include, but are not limited to: butylated hydroxytoluene (BHT), calcium carbonate, calcium phosphate (dibasic), calcium stearate, croscarmellose, crosslinked polyvinyl pyrrolidone, citric acid, crospovidone, cysteine, ethylcellulose, gelatin, hydroxypropyl cellulose, hydroxypropyl methylcellulose, lactose, magnesium stearate, maltitol, mannitol, methionine, methylcellulose, methyl paraben, microcrystalline cellulose, polyethylene glycol, polyvinyl pyrrolidone, povidone, pregelatinized starch, propyl paraben, retinyl palmitate, shellac, silicon dioxide, sodium carboxymethyl cellulose, sodium citrate, sodium starch glycolate, sorbitol, starch (corn), stearic acid, sucrose, talc, titanium dioxide, vitamin A, vitamin E, vitamin C, and xylitol.

[0524] Pharmaceutically acceptable salts: Pharmaceutically acceptable salts of the compounds described herein are forms of the disclosed compounds wherein the acid or base moiety is in its salt form (e.g., as generated by reacting a free base group with a suitable organic acid). Examples of pharmaceutically acceptable salts include, but are not limited to, mineral or organic acid salts of basic residues such as amines; alkali or organic salts of acidic residues such as carboxylic acids; and the like. Representative acid addition salts include acetate, adipate, alginate, ascorbate, aspartate, benzenesulfonate, benzoate, bisulfate, borate, butyrate, camphorate, camphorsulfonate, citrate, cyclopentanepropionate, digluconate, dodecylsulfate, ethanesulfonate, fumarate, glucoheptonate, glycerophosphate, hemisulfate, heptonate, hexanoate, hydrobromide, hydrochloride, hydroiodide, 2-hydroxy-ethanesulfonate, lactobionate, lactate, laurate, lauryl sulfate, malate, maleate, malonate, methanesulfonate, 2-naphthalenesulfonate, nicotinate, nitrate, oleate, oxalate, palmitate, pamoate, pectinate, persulfate, 3-phenylpropionate, phosphate, picrate, pivalate, propionate, stearate, succinate, sulfate, tartrate, thiocyanate, toluenesulfonate, undecanoate, valerate salts, and the like. Representative alkali or alkaline earth metal salts include sodium, lithium, potassium, calcium, magnesium, and the like, as well as nontoxic ammonium, quaternary ammonium, and amine cations, including, but not limited to ammonium, tetramethylammonium, tetraethylammonium, methylamine, dimethylamine, trimethylamine, triethylamine, ethylamine, and the like. Pharmaceutically acceptable salts include the conventional non-toxic salts, for example, from non-toxic inorganic or organic acids. In some embodiments a pharmaceutically acceptable salt is prepared from a parent compound which contains a basic or acidic moiety by conventional chemical methods. Generally, such salts can be prepared by reacting the free acid or base forms of these compounds with a stoichiometric amount of the appropriate base or acid in water or in an organic solvent, or in a mixture of the two; generally, nonaqueous media like ether, ethyl acetate, ethanol, isopropanol, or acetonitrile are preferred. Lists of suitable salts are found in Remington's Pharmaceutical Sciences, 17^{th} ed., Mack Publishing Company, Easton, Pa., 1985, p. 1418, Pharmaceutical Salts: Properties, Selection, and Use, P. H. Stahl and C. G. Wermuth (eds.), Wiley-VCH, 2008, and Berge et al., Journal of Pharmaceutical Science, 66, 1-19 (1977), each of which is incorporated herein by reference in its entirety. Pharmaceutically acceptable solvate: The term “pharmaceutically acceptable solvate,” as used herein, refers to a crystalline form of a compound wherein molecules of a suitable solvent are incorporated in the crystal lattice. For example, solvates may be prepared by crystallization, recrystallization, or precipitation from a solution that includes organic solvents, water, or a mixture thereof. Examples of suitable solvents are ethanol, water (for example, mono-, di-, and tri-hydrates), N-methylpyrrolidinone (NMP), dimethyl sulfoxide (DMSO), N,N′-dimethylformamide (DMF), N,N′-dimethylacetamide (DMAC), 1,3-dimethyl-2-imidazolidinone (DMEU), 1,3-dimethyl-3,4,5,6-tetrahydro-2-(1H)-pyrimidinone (DMPU), acetonitrile (ACN), propylene glycol, ethyl acetate, benzyl alcohol, 2-pyrrolidone, benzyl benzoate, and the like. When water is the solvent, the solvate is referred to as a “hydrate.” In some embodiments, the solvent incorporated into a solvate is of a type or at a level that is physiologically tolerable to an organism to which the solvate is administered (e.g., in a unit dosage form of a pharmaceutical composition).

[0525] Pharmacokinetic: As used herein, “pharmacokinetic” refers to any one or more properties of a molecule or compound as it relates to the determination of the fate of substances administered to living organisms. Pharmacokinetics are divided into several areas including the extent and rate of absorption, distribution, metabolism and excretion. This is commonly referred to as ADME where: (A) Absorption is the process of a substance entering the blood circulation; (D) Distribution is the dispersion or dissemination of substances throughout the fluids and tissues of the body; (M) Metabolism (or Biotransformation) is the irreversible transformation of parent compounds into daughter metabolites; and (E) Excretion (or Elimination) refers to the elimination of the substances from the body. In rare cases, some drugs irreversibly accumulate in body tissue.

[0526] Physicochemical: As used herein, “physicochemical” means of or relating to a physical and/or chemical property.

[0527] Preventing: As used herein, the term “preventing” refers to partially or completely delaying onset of an infection, disease, disorder and/or condition; partially or completely delaying onset of one or more symptoms, features, or clinical manifestations of a particular infection, disease, disorder, and/or condition; partially or completely delaying onset of one or more symptoms, features, or manifestations of a particular infection, disease, disorder, and/or condition; partially or completely delaying progression from an infection, a particular disease, disorder and/or condition; and/or decreasing the risk of developing pathology associated with the infection, the disease, disorder, and/or condition.

[0528] Proliferate: As used herein, the term “proliferate” means to grow, expand, replicate or increase or cause to grow, expand, replicate or increase. “Proliferative” means having the ability to proliferate. “Anti-proliferative” means having properties counter to or in opposition to proliferative properties.

[0529] Protein of interest: As used herein, the terms “proteins of interest” or “desired proteins” include those provided herein and fragments, mutants, variants, and alterations thereof.

[0530] Proximal: As used herein, the term “proximal” means situated nearer to the center or to a point or region of interest.

[0531] Purified: As used herein, the term “purify” means to make substantially pure or clear from unwanted components, material defilement, admixture or imperfection. “Purified” refers to the state of being pure. “Purification” refers to the process of making pure.

[0532] Region: As used herein, the term “region” refers to a zone or general area. In some embodiments, when referring to a protein or protein module, a region may comprise a linear sequence of amino acids along the protein or protein module or may comprise a three dimensional area, an epitope and/or a cluster of eptiopes. In some embodiments, regions comprise terminal regions. As used herein, the term “terminal region” refers to regions located at the ends or termini of a given agent. When referring to proteins, terminal regions may comprise N- and/or C-termini. N-termini refer to the end of a protein comprising an amino acid with a free amino group. C-termini refer to the end of a protein comprising an amino acid with a free carboxyl group. N- and/or C-terminal regions may there for comprise the N- and/or C-termini as well as surrounding amino acids. In some embodiments, N- and/or C-terminal regions comprise from about 3 amino acid to about 30 amino acids, from about 5 amino acids to about 40 amino acids, from about 10 amino acids to about 50 amino acids, from about 20 amino acids to about 100 amino acids and/or at least 100 amino acids. In some embodiments, N-terminal regions may comprise any length of amino acids that includes the N-terminus, but does not include the C-terminus. In some embodiments, C-terminal regions may comprise any length of amino acids, which include the C-terminus, but do not comprise the N-terminus.

[0533] Sample: As used herein, the term “sample” refers to an aliquot or portion taken from a source and/or provided for analysis or processing. In some embodiments, a sample is from a biological source such as a tissue, cell or component part (e.g. a body fluid, including but not limited to blood, mucus, lymphatic fluid, synovial fluid, cerebrospinal fluid, saliva, amniotic fluid, amniotic cord blood, urine, vaginal fluid and semen). In some embodiments, a sample may be or comprise a homogenate, lysate or extract prepared from a whole organism or a subset of its tissues, cells or component parts, or a fraction or portion thereof, including but not limited to, for example, plasma, serum, spinal fluid, lymph fluid, the external sections of the skin, respiratory, intestinal, and genitourinary tracts, tears, saliva, milk, blood cells, tumors, organs. In some embodiments, a sample is or comprises a medium, such as a nutrient broth or gel, which may contain cellular components, such as proteins or nucleic acid molecule. In some embodiments, a “primary” sample is an aliquot of the source. In some embodiments, a primary sample is subjected to one or more processing (e.g., separation, purification, etc.) steps to prepare a sample for analysis or other use.

[0534] Signal Sequences: As used herein, the phrase “signal sequences” refers to a sequence which can direct the transport or localization.

[0535] Single unit dose: As used herein, a “single unit dose” is a dose of any therapeutic administered in one dose/at one time/single route/single point of contact, i.e., single administration event. In some embodiments, a single unit dose is provided as a discrete dosage form (e.g., a tablet, capsule, patch, loaded syringe, vial, etc.).

[0536] Similarity: As used herein, the term “similarity” refers to the overall relatedness between polymeric molecules, e.g. between polynucleotide molecules (e.g. DNA molecules and/or RNA molecules) and/or between polypeptide molecules. Calculation of percent similarity of polymeric molecules to one another can be performed in the same manner as a calculation of percent identity, except that calculation of percent similarity takes into account conservative substitutions as is understood in the art.

[0537] Split dose: As used herein, a “split dose” is the division of single unit dose or total daily dose into two or more doses.

[0538] Stable: As used herein “stable” refers to a compound or entity that is sufficiently robust to survive isolation to a useful degree of purity from a reaction mixture, and preferably capable of formulation into an efficacious therapeutic agent.

[0539] Stabilized: As used herein, the term “stabilize”, “stabilized,” “stabilized region” means to make or become stable. In some embodiments, stability is measured relative to an absolute value. In some embodiments, stability is measured relative to a reference compound or entity.

[0540] Subject: As used herein, the term “subject” or “patient” refers to any organism to which a composition in accordance with the invention may be administered, e.g., for experimental, diagnostic, prophylactic, and/or therapeutic purposes. Typical subjects include animals (e.g., mammals such as mice, rats, rabbits, non-human primates, and humans) and/or plants.

[0541] Substantially: As used herein, the term “substantially” refers to the qualitative condition of exhibiting total or near-total extent or degree of a characteristic or property of interest. One of ordinary skill in the biological arts will understand that biological and chemical phenomena rarely, if ever, go to completion and/or proceed to completeness or achieve or avoid an absolute result. The term “substantially” is therefore used herein to capture the potential lack of completeness inherent in many biological and chemical phenomena.

[0542] Substantially equal: As used herein as it relates to time differences between doses, the term means plus/minus 2%.

[0543] Substantially simultaneously: As used herein and as it relates to plurality of doses, the term typically means within about 2 seconds.

[0544] Suffering from: An individual who is “suffering from” a disease, disorder, and/or condition has been diagnosed with or displays one or more symptoms of a disease, disorder, and/or condition.

[0545] Susceptible to: An individual who is “susceptible to” a disease, disorder, and/or condition has not been diagnosed with and/or may not exhibit symptoms of the disease, disorder, and/or condition but harbors a propensity to develop a disease or its symptoms. In some embodiments, an individual who is susceptible to a disease, disorder, and/or condition (for example, cancer) may be characterized by one or more of the following: (1) a genetic mutation associated with development of the disease, disorder, and/or condition; (2) a genetic polymorphism associated with development of the disease, disorder, and/or condition; (3) increased and/or decreased expression and/or activity of a protein and/or nucleic acid associated with the disease, disorder, and/or condition; (4) habits and/or lifestyles associated with development of the disease, disorder, and/or condition; (5) a family history of the disease, disorder, and/or condition; and (6) exposure to and/or infection with a microbe associated with development of the disease, disorder, and/or condition. In some embodiments, an individual who is susceptible to a disease, disorder, and/or condition will develop the disease, disorder, and/or condition. In some embodiments, an individual who is susceptible to a disease, disorder, and/or condition will not develop the disease, disorder, and/or condition.

[0546] Synthetic: The term “synthetic” means produced, prepared, and/or manufactured by the hand of man. Synthesis of polynucleotides or polypeptides or other molecules of the present invention may be chemical or enzymatic.

[0547] Targeted Cells: As used herein, “targeted cells” refers to any one or more cells of interest. The cells may be found in vitro, in vivo, in situ or in the tissue or organ of an organism. The organism may be an animal, preferably a mammal, more preferably a human and most preferably a patient.

[0548] Therapeutic Agent: The term “therapeutic agent” refers to any agent that, when administered to a subject, has a therapeutic, diagnostic, and/or prophylactic effect and/or elicits a desired biological and/or pharmacological effect.

[0549] Therapeutically effective amount: As used herein, the term “therapeutically effective amount” means an amount of an agent to be delivered (e.g., nucleic acid, drug, therapeutic agent, diagnostic agent, prophylactic agent, etc.) that is sufficient, when administered to a subject suffering from or susceptible to an infection, disease, disorder, and/or condition, to treat, improve symptoms of, diagnose, prevent, and/or delay the onset of the infection, disease, disorder, and/or condition. In some embodiments, a therapeutically effective amount is provided in a single dose. In some embodiments, a therapeutically effective amount is administered in a dosage regimen comprising a plurality of doses. Those skilled in the art will appreciate that in some embodiments, a unit dosage form may be considered to comprise a therapeutically effective amount of a particular agent or entity if it comprises an amount that is effective when administered as part of such a dosage regimen.

[0550] Therapeutically effective outcome: As used herein, the term “therapeutically effective outcome” means an outcome that is sufficient in a subject suffering from or susceptible to an infection, disease, disorder, and/or condition, to treat, improve symptoms of, diagnose, prevent, and/or delay the onset of the infection, disease, disorder, and/or condition.

[0551] Total daily dose: As used herein, a “total daily dose” is an amount given or prescribed in a 24 hr period. It may be administered as a single unit dose.

[0552] Treating: As used herein, the term “treating” refers to partially or completely alleviating, ameliorating, improving, relieving, delaying onset of, inhibiting progression of, reducing severity of, and/or reducing incidence of one or more symptoms or features of a particular infection, disease, disorder, and/or condition. For example, “treating” cancer may refer to inhibiting survival, growth, and/or spread of a tumor. Treatment may be administered to a subject who does not exhibit signs of a disease, disorder, and/or condition and/or to a subject who exhibits only early signs of a disease, disorder, and/or condition for the purpose of decreasing the risk of developing pathology associated with the disease, disorder, and/or condition.

[0553] Unmodified: As used herein, “unmodified” refers to any substance, compound or molecule prior to being changed in any way. Unmodified may, but does not always, refer to the wild type or native form of a biomolecule or entity. Molecules or entities may undergo a series of modifications whereby each modified product may serve as the “unmodified” starting molecule or entity for a subsequent modification.

### Equivalents and Scope

[0554] Those skilled in the art will recognize, or be able to ascertain using no more than routine experimentation, many equivalents to the specific embodiments in accordance with the invention described herein. The scope of the present invention is not intended to be limited to the above Description, but rather is as set forth in the appended claims.

[0555] In the claims, articles such as “a,” “an,” and “the” may mean one or more than one unless indicated to the contrary or otherwise evident from the context. Claims or descriptions that include “or” between one or more members of a group are considered satisfied if one, more than one, or all of the group members are present in, employed in, or otherwise relevant to a given product or process unless indicated to the contrary or otherwise evident from the context. The invention includes embodiments in which exactly one member of the group is present in, employed in, or otherwise relevant to a given product or process. The invention includes embodiments in which more than one, or the entire group members are present in, employed in, or otherwise relevant to a given product or process.

[0556] It is also noted that the term “comprising” is intended to be open and permits but does not require the inclusion of additional elements or steps. When the term “comprising” is used herein, the term “consisting of” is thus also encompassed and disclosed.

[0557] Where ranges are given, endpoints are included. Furthermore, it is to be understood that unless otherwise indicated or otherwise evident from the context and understanding of one of ordinary skill in the art, values that are expressed as ranges can assume any specific value or subrange within the stated ranges in different embodiments of the invention, to the tenth of the unit of the lower limit of the range, unless the context clearly dictates otherwise.

[0558] In addition, it is to be understood that any particular embodiment of the present invention that falls within the prior art may be explicitly excluded from any one or more of the claims. Since such embodiments are deemed to be known to one of ordinary skill in the art, they may be excluded even if the exclusion is not set forth explicitly herein. Any particular embodiment of the compositions of the invention (e.g., any nucleic acid or protein encoded thereby; any method of production; any method of use; etc.) can be excluded from any one or more claims, for any reason, whether or not related to the existence of prior art.

[0559] All cited sources, for example, references, publications, databases, database entries, and art cited herein, are incorporated into this application by reference, even if not expressly stated in the citation. In case of conflicting statements of a cited source and the instant application, the statement in the instant application shall control.

[0560] Section and table headings are not intended to be limiting.

### VII. EXAMPLES

### Example 1. Recombinant AAV Production in Invertebrate Cells

[0561] The AAV viral expression construct encodes the three structural cap proteins, VP1, VP2, and VP3, in a single open reading frame regulated by utilization of both alternative splice acceptor and non-canonical translational initiation codon(s). In-frame and out-of-frame ATG triplets preventing translation initiation at a position between the VP1 and VP2 start codons are eliminated. Both Rep 78 and Rep 52 are translated from a single transcript: Rep 78 translation initiates at a non-AUG codon and Rep 52 translation initiates at the first AUG in the transcript.

[0562] The nucleotides that encode the structural VP1, VP2, and VP3 capsid proteins and non-structural Rep78 and Rep 52 proteins are contained on one viral expression construct under control of the baculovirus major late promoter.

[0563] The payload construct vector encodes two ITR sequences flanking a transgene, polynucleotide encoding a polypeptide or modulatory nucleic acid. The ITR sequences allow for replication of a polynucleotide encoding the transgene and ITR sequences alone that will be packaged within the capsid of the viral vector.

[0564] A seed culture of Sf9 cells in serum free suspension culture is co-transfected with the payload construct vector and the viral expression construct. The culture is maintained for 48 hours while two baculoviruses are produced and released into the medium, one containing the payload construct vector and a second containing the viral expression construct. The baculovirus released into the media continue to infect Sf9 cells in an exponential manner until all of the Sf9 cells in the culture are infected at least once with both baculoviruses. In each viral replication cell that has been infected with both baculoviruses the payload flanked on either end with an ITR sequence is replicated and packaged in a capsid assembled from the proteins VP1, VP2, and VP3. The cells and media of the seed culture is harvested and divided into aliquots before being frozen in liquid nitrogen.

[0565] A naïve population of un-transfected Sf9 cells is expanded in serum free suspension cell culture conditions. Once the culture growth has reached peak log phase in 1 L of media as measured by optical density the culture is added to a large volume 20 L bioreactor. The bioreactor culture is inoculated with a frozen aliquot from the baculovirus seed culture. The conditions of the Sf9 cell suspension culture is monitored by instruments that measure and/or control external variables that support the growth and activity of viral replication cells such as mass, temperature, CO2, O2, pH, and/or optical density (OD). The Sf9 culture is maintained at optimal conditions until cell population growth has reached peak log phase and before cell growth has plateaued, as measured by optical density.

[0566] The viral replication cells are lysed using the Microfluidizer™ (Microfluidics International Corp., Newton, Mass.), high shear force fluid processor. The resultant cell lysate is clarified by low speed centrifugation followed by tangential flow filtration. The resultant clarified lysate is filtered by a size exclusion column to remove any remaining baculoviral particles from solution. The final steps utilize ultracentrifugation and sterile filtration to produce viral vectors suitable for use as described herein.

### Example 2. Recombinant AAV Production in Mammalian Cells

[0567] The AAV viral expression construct encodes the three structural cap proteins, VP1, VP2, and VP3, in a single open reading frame regulated by utilization of both alternative splice acceptor and non-canonical translational initiation codon(s). In-frame and out-of-frame ATG triplets preventing translation initiation at a position between the VP1 and VP2 start codons are eliminated. Both Rep 78 and Rep 52 are translated from a single transcript: Rep 78 translation initiates at a non-AUG codon and Rep 52 translation initiates at the first AUG in the transcript.

[0568] The nucleotides that encode the structural VP1, VP2, and VP3 capsid proteins and non-structural Rep78 and Rep 52 proteins are contained on one viral expression construct under control of the CMV promoter.

[0569] The payload construct vector encodes two ITR sequences flanking the payload, e.g., a transgene, polynucleotide encoding a polypeptide or modulatory nucleic acid molecule. The ITR sequences allow for replication of a polynucleotide encoding the payload and ITR sequences that will be packaged within the capsid of the viral vector.

[0570] A seed culture of Chinese Hamster Ovary (CHO) cells adapted for growth in serum free suspension culture is co-transfected with the payload construct vector and the viral expression construct. The culture is maintained for 48 hours while two baculoviruses are produced and released into the medium, one containing the payload construct vector and a second containing the viral expression construct. The baculovirus released into the media continue to infect CHO cells in an exponential manner until all of the CHO cells in the culture are infected at least once with both baculoviruses. In each viral replication cell that has been infected with both baculoviruses the payload flanked on either end with an ITR sequence is replicated and packaged in a capsid assembled from the proteins VP1, VP2, and VP3. The cells and media of the seed culture is harvested and divided into aliquots before being frozen in, for example, liquid nitrogen.

[0571] A naïve population of un-transfected CHO cells is expanded in serum free suspension cell culture conditions. Once the culture growth has reached peak log phase in 1 L of media as measured by optical density the culture is added to a large volume 20 L bioreactor. The bioreactor culture is inoculated with a frozen aliquot from the baculovirus seed culture. The conditions of the CHO cell suspension culture is monitored by instruments that measure and/or control external variables that support the growth and activity of viral replication cells such as mass, temperature, CO2, O2, pH, and/or optical density (OD). The CHO culture is maintained at optimal conditions until cell population growth has reached peak log phase and before cell growth has plateaued, as measured by optical density.

[0572] The viral replication cells are lysed using the Microfluidizer™ (Microfluidics International Corp., Newton, Mass.), high shear force fluid processor. The resultant cell lysate is clarified by low speed centrifugation followed by tangential flow filtration. The resultant clarified lysate is filtered by a size exclusion column to remove any remaining baculoviral particles from solution. The final steps utilize ultracentrifugation and sterile filtration to produce viral vector suitable for uses described herein.

### Example 3. Large Scale PEI Transfection

[0573] Polyethyleneimine (PEI) is used to form PEI-DNA complexes. Plasmids being transfected are combined with PEI in PBS and allowed to incubate at room temperature for 10 minutes. HEK 293 cell cultures being transfected are ‘shocked’ at 4° C. for 1 hour before being returned to the 37° C. incubator for a period of 6-24 hours (to arrest cell cycle at the junction between G2 phase and M phase.) PEI-DNA transfection complexes are then added to the cells under shaking conditions and allowed to incubate 6 hours. After incubation, an equal volume of fresh medium is added and cells are incubated for 24-96 hours.

### Example 4. Chimeric Capsid Design

[0574] For chimeric capsid design, an alignment of cap nucleotide sequences from AAV variants was constructed to identify variable regions (VR) at the sequence level (FIG. 4). Additionally, an alignment of capsid protein structures from AAV variants was constructed to identify variable regions (VR) at the structural level (FIG. 5). An analysis of the correlation between structural features of the capsid and the degree of conservation of the sequence was performed. Based on this sequence and structural alignments of AAV capsids, ten VR were identified as regions of interest (eight are shown in FIG. 5, a-h), including nine previously undescribed regions of structural definition and regions of a structural element known as the HI loop.

[0575] In on embodiment, chimeric capsid design is achieved such that chimeras are designed where one or more VR from a cap gene from a donor sequence is swapped (either the entire VR or subsets of the VR) with a VR from a cap gene in an acceptor sequence. This design scheme is shown in FIG. 8.

### Example 5. CNS Specific Chimeric Capsid Design

[0576] For CNS specific chimeric capsid design, an alignment of cap nucleotide sequences from AAV variants exhibiting CNS tropism was constructed to identify variable regions (VR) at the sequence level (FIG. 6). Additionally, an alignment of capsid protein structures from AAV variants exhibiting CNS tropism was constructed to identify variable regions (VR) at the structural level (FIG. 7). An analysis of the correlation between structural features of the capsid and the degree of conservation of the sequence was performed. Based on this sequence and structural alignments of AAV capsids, twelve VR were identified as regions of interest (seven are shown in FIG. 7, a-g), including previously undescribed regions of structural definition and regions of a structural element known as the HI loop.

[0577] In on embodiment, chimeric capsid design is achieved such that chimeras are designed where one or more VR from a cap gene from a donor sequence is swapped (either the entire VR or subsets of the VR) with a VR from a cap gene in an acceptor sequence. This design scheme is shown in FIG. 8.

### Example 6. Chimeric Capsid Variants

[0578] Chimeric capsids were designed based on a series of donor, e.g., parent or reference sequences from publicly available sequences. Table 9 lists capsid proteins that were used as donor sequences and or the variants designed from them. In the table, the parent or reference sequences include either a GenBank sequence reference or a pdb reference from the crystal structure where the variants designed list only a VOY ID number.

TABLE 9
AAV Capsid Variants

| VOY ID | SEQ ID NO. |
|---|---|
| VOY1 | 300 |
| VOY2 | 301 |
| VOY3 | 300 |
| VOY4 | 302 |
| VOY5 | 303 |
| VOY6 | 304 |
| VOY7 | 305 |
| VOY8 | 306 |
| VOY9 | 307 |
| VOY10 | 308 |
| VOY11 | 309 |
| VOY12 | 310 |
| VOY13 | 311 |
| VOY14 | 312 |
| VOY15 | 313 |
| VOY16 | 314 |
| VOY17 | 315 |
| VOY18 | 36 |
| VOY19 | 312 |
| AAV6 (AAB95450.1) | 317 |
| VOY20 | 318 |
| VOY21 | 319 |
| VOY22 | 320 |
| VOY23 | 321 |
| VOY24 | 322 |
| VOY25 | 323 |
| VOY26 | 324 |
| VOY27 | 325 |
| VOY28 | 326 |
| VOY29 | 327 |
| VOY30 | 328 |
| VOY31 | 329 |
| VOY32 | 330 |
| AAV9 (AAS99264.1) | 331 |
| VOY33 | 332 |
| VOY34 | 333 |
| VOY35 | 334 |
| VOY36 | 335 |
| VOY37 | 336 |
| VOY38 | 337 |
| VOY39 | 338 |
| VOY40 | 338 |
| VOY41 | 339 |
| VOY42 | 340 |
| VOY43 | 341 |
| VOY44 | 342 |
| VOY45 | 343 |
| VOY46 | 344 |
| VOY47 | 345 |
| VOY48 | 346 |
| VOY49 | 347 |
| VOY50 | 348 |
| VOY51 | 349 |
| VOY52 | 350 |
| VOY53 | 351 |
| VOY54 | 352 |
| VOY55 | 353 |
| VOY56 | 354 |
| VOY57 | 355 |
| VOY58 | 356 |
| VOY59 | 357 |
| VOY60 | 358 |
| VOY61 | 359 |
| VOY62 | 360 |
| VOY63 | 338 |
| VOY64 | 361 |
| VOY65 | 362 |
| VOY66 | 363 |
| VOY67 | 364 |
| VOY68 | 365 |
| VOY69 | 331 |
| VOY70 | 366 |
| VOY71 | 367 |
| VOY72 | 368 |
| VOY73 | 369 |
| VOY74 | 370 |
| VOY75 | 371 |
| VOY76 | 372 |
| VOY77 | 373 |
| VOY78 | 374 |
| VOY79 | 375 |
| VOY80 | 376 |
| VOY81 | 377 |
| VOY82 | 378 |
| VOY83 | 379 |

[0579] The capsid variants of Table 9 are subjected to the method of Adachi, K. et al. (Drawing a high-resolution functional map of adeno-associated virus capsid by massively parallel sequencing. Nat. Commun. 5:3075 doi: 10.1038/ncomms4075 (2014); the contents of which are incorporated herein by reference in their entirety) involving a next-generation sequencing (NGS) Barcode-Seq method. Briefly, this method utilizes DNA barcode-tagged mutagenesis in conjunction with multiplexed sequencing. Results of the barcode-Seq method provide amino-acid sequence-viral capsid phenotype correlations in a high-throughput manner.

[0580] Such phenotypic correlations are then explored using one or more animal models.

[0581] In one study, non-human primates are injected intravenously with the AAV library of approximately 150 AAV strains and samples are collected during a 6-week period. Samples collected include body fluids and tissues. Barcode-Seq analysis is performed on the samples.

[0582] Multiple libraries may be subjected to the same procedure as above for phenotypic characterization. Libraries contain between 150-300 AAV strains.

[0583] Libraries may be larger or smaller, e.g., 50 strains per library.

[0584] Phenotypic analyses include but are not limited to, blood clearance rate, tissue tropism, transduction efficiency, organ or tissue targeting, reactivity to neutralizing antibodies, and AAV neutralizing antibody epitope mapping.

[0585] Organ targeting is measured for liver, heart, lung, brain, CNS tissue, kidneys, and muscle. Phenotypic responses are used to further optimize capsid designs as taught herein.

### Example 7. Variable Region I (VRI) Chimeric Capsids

[0586] Chimeric capsids were designed and generated using a common AAV2 sequence. Variable region I (VRI) of the AAV2 sequence was swapped with sequences from AAV8, AAV9, AAV10, AAV-DJ, or AAVrh8 VRI regions as depicted in FIG. 9. The resultant chimeric capsid nucleic acid sequences are listed in Table 10 and the encoded protein sequences in Table 11.

TABLE 10
Variable Region I (VRI) Chimeric Capsids Nucleotide Sequences

| VOY ID | SEQ ID NO. |
|---|---|
| VOY84 | 380 |
| VOY85 | 381 |
| VOY86 | 382 |
| VOY87 | 383 |
| VOY88 | 384 |
| VOY89 | 385 |

TABLE 11
Variable Region I (VRI) Chimeric Capsids Polypeptide Sequences

| VOY ID | SEQ ID NO. |
|---|---|
| VOY90 | 386 |
| VOY91 | 387 |
| VOY92 | 388 |
| VOY93 | 389 |
| VOY94 | 390 |
| VOY95 | 391 |

### Example 8. Variable Region IV (VRIV) Chimeric Capsids

[0587] Chimeric capsids were generated using a common AAV2 sequence. VRIV of the AAV2 sequence was swapped with a sequence from AAV8, AAV9, AAVrh8, AAVrh10, and AAV-DJ VRIV regions as depicted in FIG. 10. The nucleic acid sequences are shown in Table 12 and the resultant chimeric capsid protein sequences are listed in Table 13.

TABLE 12
Variable Region IV (VRIV) Chimeric
Capsids Nucleotide Sequences

| VOY ID | SEQ ID NO. |
|---|---|
| VOY96 | 392 |
| VOY97 | 393 |
| VOY98 | 394 |
| VOY99 | 395 |
| VOY100 | 396 |
| VOY101 | 397 |

TABLE 13
Variable Region IV (VRIV) Chimeric
Capsids Polypeptide Sequences

| VOY ID | SEQ ID NO. |
|---|---|
| VOY102 | 398 |
| VOY103 | 399 |
| VOY104 | 400 |
| VOY105 | 401 |
| VOY106 | 402 |
| VOY107 | 403 |

### Example 9. Additional AAV Capsid Variants

[0588] Chimeric capsids were designed based on a series of donor, e.g., parent or reference sequences from publicly available sequences. Capsid variants are engineered based on AAV capsids from viral sequences which may infect a variety of species including those listed in the table. Nucleic acid sequences are provided in Table 14.

TABLE 14
Additional AAV Capsid Variant Nucleotide Sequences

| VOY ID | SEQ ID NO. |
|---|---|
| AAVrh10 (AY243015.1) | 404 |
| AAV11 (AY631966.1) | 405 |
| AAV12 (DQ813647.1) | 406 |
| VOY108 | 407 |
| VOY109 | 408 |
| VOY110 | 409 |
| VOY111 | 186 |
| VOY112 | 410 |
| VOY113 | 162 |
| VOY114 | 411 |
| VOY115 | 412 |
| VOY116 | 413 |

TABLE 15
Additional AAV Capsid Variant Polypeptide Sequences

| VOY ID | SEQ ID NO. |
|---|---|
| AAVrh10 (AY243015.1) | 414 |
| AAV11 (AY631966.1) | 415 |
| AAV12 (DQ813647.1) | 416 |
| VOY117 | 417 |
| VOY118 | 418 |
| VOY119 | 419 |
| VOY120 | 420 |
| VOY121 | 421 |
| VOY122 | 422 |
| VOY123 | 423 |
| VOY124 | 424 |
| VOY125 | 425 |
| VOY126 | 426 |
| VOY127 | 427 |
| VOY128 | 428 |

### Example 10. Central Nervous System AAV Delivery

[0589] Viral vectors are produced as taught herein and prepared for delivery to the central nervous system. In one aspect, preparation for CNS delivery is according to the method of Foust et al (Foust, K. D. et al., 2009. Nat Biotechnol 27:59-65, the contents of which are herein incorporated by reference in their entirety).

[0590] According to the Foust method, AAV9 viral vectors delivered by venous injection are transported across the blood brain barrier (BBB) and carry out astrocyte transduction. Viruses are produced and purified by cesium chloride gradient purification, followed by dialysis against phosphate buffered saline (PBS.) Resulting preparations are formulated with 0.001% Pluronic-F68 to discourage viral aggregation. Viral preparations are titrated following quantitative-PCR analysis of viral levels. Purity of viral preparations is further assessed by gel electrophoresis and subsequent silver staining (Invitrogen, Carlsbad, Calif.). Viral preparations are then delivered to subjects by intravenous injection. Viral payloads are delivered to cells of the CNS.

### Example 11. AAV Polynucleotides Encoding Chimeric Capsid Proteins

[0591] Viral vectors are produced and analyzed using methods known in the art and described herein to determine if the adeno-associated viral (AAV) polynucleotide encoding a chimeric capsid protein have enhanced transduction, reduced immunogenicity, enhanced crossing the blood-brain barrier, improved expression, and/or increased expression in a baculovirus system as compared to adeno-associated viral (AAV) polynucleotides encoding a non-chimeric capsid protein.

1. A viral particle comprising a chimeric capsid protein encoded by a comprising:
(a) a first nucleotide sequence region, said first nucleotide sequence region derived from a donor sequence; and
(b) a second nucleotide sequence region, said second nucleotide sequence region being derived from an acceptor sequence.

2. The viral particle of claim 1, wherein said first or said second nucleotide sequence regions comprise a variable region (VR) or portion thereof.

3. The viral particle of claim 2, wherein the variable region is selected from the group consisting of VRI-CNS, VRII-CNS, VRIII-CNS, VRIV-CNS, VRV-CNS, VRVI-CNS, VRVII-CNS, VRVII-CNS, VRIX-CNS, VRX-CNS, VRXI-CNS, VRXII-CNS and HI loop in FIG. 6.

4. The viral particle of claim 2, wherein the variable region is selected from the group consisting of VRI, VRII, VRIII, VRIV, VRV, VRVI, VRVII, VRVIII, VRIX and HI loop in FIG. 4.

5. The viral particle of claim 2, wherein the donor or acceptor sequence is selected from any of those listed in Tables 1-6.

6. The viral particle of claim 1, wherein the sequences are derived from a sequence selected from the group consisting of AAV1, AAV2, AAV3, AAV4, AAV5, AAV6, AAV7, AAV8, AAV9, AAV10, AAV11, AAV12, AAVrh8, AAVrh10 and AAV-DJ.

7. The viral particle of claim 6, wherein the sequence is derived from AAV2.

8. (canceled)

9. (canceled)

10. (canceled)

11. (canceled)

12. (canceled)

13. The viral particle of claim 1, comprising an adeno-associated viral (AAV) polynucleotide encoding at least one transgene or payload.

14. The viral particle of claim 13, wherein said at least one transgene or payload encodes a therapeutic protein for a neurological disease, disorder and/or condition.

15. A pharmaceutical composition comprising the viral particle virus of any of claim 13 and one or more pharmaceutically acceptable excipients.

16. A method of treating a disease, disorder and/or condition comprising administration of a pharmaceutical composition according to claim 15.

17. The method of claim 16, wherein said disease, disorder and/or condition comprises a neurological disease, disorder and/or condition.

18. The method of claim 17, wherein said neurological disease, disorder and/or condition is Parkinson's disease.

19. The method of claim 17, wherein said neurological disease, disorder and/or condition is Huntington's disease.

20. The method of claim 16, wherein said neurological disease, disorder and/or condition is Amyotrophic Lateral Sclerosis.

21. The method of claim 17, wherein said neurological disease, disorder and/or condition is Alzheimer's disease.

22. The method of claim 17, wherein said neurological disease, disorder and/or condition is Friedreich's ataxia.

23. The method of claim 17, wherein said neurological disease, disorder and/or condition is Spinal Muscular Atrophy.

24. The viral particle of claim 13, wherein said at least one transgene or payload is selected from the group consisting of RNAi, siRNA, shRNA, miRNA and a precursor thereof.

The application's sequence listing, which the Patent Office published only in electronic form, follows.

SEQUENCE LISTING (450 sequences)

SEQ ID NO: 1 - DNA, 4718 bp, Adeno-associated virus
ttgcccactccctctctgcgcgctcgctcgctcggtggggcctgcggaccaaaggtccgcagacggcagagctctgctctgccggccccaccgagcgagcgagcgcgcagagagggagtgggcaactccatcactaggggtaatcgcgaagcgcctcccacgctgccgcgtcagcgctgacgtaaattacgtcataggggagtggtcctgtattagctgtcacgtgagtgcttttgcgacattttgcgacaccacgtggccatttagggtatatatggccgagtgagcgagcaggatctccattttgaccgcgaaatttgaacgagcagcagccatgccgggcttctacgagatcgtgatcaaggtgccgagcgacctggacgagcacctgccgggcatttctgactcgtttgtgagctgggtggccgagaaggaatgggagctgcccccggattctgacatggatctgaatctgattgagcaggcacccctgaccgtggccgagaagctgcagcgcgacttcctggtccaatggcgccgcgtgagtaaggccccggaggccctcttctttgttcagttcgagaagggcgagtcctacttccacctccatattctggtggagaccacgggggtcaaatccatggtgctgggccgcttcctgagtcagattagggacaagctggtgcagaccatctaccgcgggatcgagccgaccctgcccaactggttcgcggtgaccaagacgcgtaatggcgccggaggggggaacaaggtggtggacgagtgctacatccccaactacctcctgcccaagactcagcccgagctgcagtgggcgtggactaacatggaggagtatataagcgcctgtttgaacctggccgagcgcaaacggctcgtggcgcagcacctgacccacgtcagccagacccaggagcagaacaaggagaatctgaaccccaattctgacgcgcctgtcatccggtcaaaaacctccgcgcgctacatggagctggtcgggtggctggtggaccggggcatcacctccgagaagcagtggatccaggaggaccaggcctcgtacatctccttcaacgccgcttccaactcgcggtcccagatcaaggccgctctggacaatgccggcaagatcatggcgctgaccaaatccgcgcccgactacctggtaggccccgctccgcccgcggacattaaaaccaaccgcatctaccgcatcctggagctgaacggctacgaacctgcctacgccggctccgtctttctcggctgggcccagaaaaggttcgggaagcgcaacaccatctggctgtttgggccggccaccacgggcaagaccaacatcgcggaagccatcgcccacgccgtgcccttctacggctgcgtcaactggaccaatgagaactttcccttcaatgattgcgtcgacaagatggtgatctggtgggaggagggcaagatgacggccaaggtcgtggagtccgccaaggccattctcggcggcagcaaggtgcgcgtggaccaaaagtgcaagtcgtccgcccagatcgaccccacccccgtgatcgtcacctccaacaccaacatgtgcgccgtgattgacgggaacagcaccaccttcgagcaccagcagccgttgcaggaccggatgttcaaatttgaactcacccgccgtctggagcatgactttggcaaggtgacaaagcaggaagtcaaagagttcttccgctgggcgcaggatcacgtgaccgaggtggcgcatgagttctacgtcagaaagggtggagccaacaaaagacccgcccccgatgacgcggataaaagcgagcccaagcgggcctgcccctcagtcgcggatccatcgacgtcagacgcggaaggagctccggtggactttgccgacaggtaccaaaacaaatgttctcgtcacgcgggcatgcttcagatgctgtttccctgcaagacatgcgagagaatgaatcagaatttcaacatttgcttcacgcacgggacgagagactgttcagagtgcttccccggcgtgtcagaatctcaaccggtcgtcagaaagaggacgtatcggaaactctgtgccattcatcatctgctggggcgggctcccgagattgcttgctcggcctgcgatctggtcaacgtggacctggatgactgtgtttctgagcaataaatgacttaaaccaggtatggctgccgatggttatcttccagattggctcgaggacaacctctctgagggcattcgcgagtggtgggacttgaaacctggagccccgaagcccaaagccaaccagcaaaagcaggacgacggccggggtctggtgcttcctggctacaagtacctcggacccttcaacggactcgacaagggggagcccgtcaacgcggcggacgcagcggccctcgagcacgacaaggcctacgaccagcagctcaaagcgggtgacaatccgtacctgcggtataaccacgccgacgccgagtttcaggagcgtctgcaagaagatacgtcttttgggggcaacctcgggcgagcagtcttccaggccaagaagcgggttctcgaacctctcggtctggttgaggaaggcgctaagacggctcctggaaagaaacgtccggtagagcagtcgccacaagagccagactcctcctcgggcatcggcaagacaggccagcagcccgctaaaaagagactcaattttggtcagactggcgactcagagtcagtccccgatccacaacctctcggagaacctccagcaacccccgctgctgtgggacctactacaatggcttcaggcggtggcgcaccaatggcagacaataacgaaggcgccgacggagtgggtaatgcctcaggaaattggcattgcgattccacatggctgggcgacagagtcatcaccaccagcacccgcacctgggccttgcccacctacaataaccacctctacaagcaaatctccagtgcttcaacgggggccagcaacgacaaccactacttcggctacagcaccccctgggggtattttgatttcaacagattccactgccacttttcaccacgtgactggcagcgactcatcaacaacaattggggattccggcccaagagactcaacttcaaactcttcaacatccaagtcaaggaggtcacgacgaatgatggcgtcacaaccatcgctaataaccttaccagcacggttcaagtcttctcggactcggagtaccagcttccgtacgtcctcggctctgcgcaccagggctgcctccctccgttcccggcggacgtgttcatgattccgcaatacggctacctgacgctcaacaatggcagccaagccgtgggacgttcatccttttactgcctggaatatttcccttctcagatgctgagaacgggcaacaactttaccttcagctacacctttgaggaagtgcctttccacagcagctacgcgcacagccagagcctggaccggctgatgaatcctctcatcgaccaatacctgtattacctgaacagaactcaaaatcagtccggaagtgcccaaaacaaggacttgctgtttagccgtgggtctccagctggcatgtctgttcagcccaaaaactggctacctggaccctgttatcggcagcagcgcgtttctaaaacaaaaacagacaacaacaacagcaattttacctggactggtgcttcaaaatataacctcaatgggcgtgaatccatcatcaaccctggcactgctatggcctcacacaaagacgacgaagacaagttctttcccatgagcggtgtcatgatttttggaaaagagagcgccggagcttcaaacactgcattggacaatgtcatgattacagacgaagaggaaattaaagccactaaccctgtggccaccgaaagatttgggaccgtggcagtcaatttccagagcagcagcacagaccctgcgaccggagatgtgcatgctatgggagcattacctggcatggtgtggcaagatagagacgtgtacctgcagggtcccatttgggccaaaattcctcacacagatggacactttcacccgtctcctcttatgggcggctttggactcaagaacccgcctcctcagatcctcatcaaaaacacgcctgttcctgcgaatcctccggcggagttttcagctacaaagtttgcttcattcatcacccaatactccacaggacaagtgagtgtggaaattgaatgggagctgcagaaagaaaacagcaagcgctggaatcccgaagtgcagtacacatccaattatgcaaaatctgccaacgttgattttactgtggacaacaatggactttatactgagcctcgccccattggcacccgttaccttacccgtcccctgtaattacgtgttaatcaataaaccggttgattcgtttcagttgaactttggtctcctgtccttcttatcttatcggttaccatggttatagcttacacattaactgcttggttgcgcttcgcgataaaagacttacgtcatcgggttacccctagtgatggagttgcccactccctctctgcgcgctcgctcgctcggtggggcctgcggaccaaaggtccgcagacggcagagctctgctctgccggccccaccgagcgagcgagcgcgcagagagggagtgggcaa

SEQ ID NO: 2 - DNA, 4726 bp, Adeno-associated virus
ttggccactccctctatgcgcactcgctcgctcggtggggcctggcgaccaaaggtcgccagacggacgtgctttgcacgtccggccccaccgagcgagcgagtgcgcatagagggagtggccaactccatcactagaggtatggcagtgacgtaacgcgaagcgcgcgaagcgagaccacgcctaccagctgcgtcagcagtcaggtgacccttttgcgacagtttgcgacaccacgtggccgctgagggtatatattctcgagtgagcgaaccaggagctccattttgaccgcgaaatttgaacgagcagcagccatgccggggttctacgagattgtcctgaaggtcccgagtgacctggacgagcgcctgccgggcatttctaactcgtttgttaactgggtggccgagaaggaatgggacgtgccgccggattctgacatggatccgaatctgattgagcaggcacccctgaccgtggccgaaaagcttcagcgcgagttcctggtggagtggcgccgcgtgagtaaggccccggaggccctcttttttgtccagttcgaaaagggggagacctacttccacctgcacgtgctgattgagaccatcggggtcaaatccatggtggtcggccgctacgtgagccagattaaagagaagctggtgacccgcatctaccgcggggtcgagccgcagcttccgaactggttcgcggtgaccaaaacgcgaaatggcgccgggggcgggaacaaggtggtggacgactgctacatccccaactacctgctccccaagacccagcccgagctccagtgggcgtggactaacatggaccagtatttaagcgcctgtttgaatctcgcggagcgtaaacggctggtggcgcagcatctgacgcacgtgtcgcagacgcaggagcagaacaaagagaatcagaaccccaattctgacgcgccggtcatcaggtcaaaaacctcagccaggtacatggagctggtcgggtggctggtggaccgcgggatcacgtcagaaaagcaatggattcaggaggaccaggcctcgtacatctccttcaacgccgcctccaactcgcggtcccagatcaaggccgcgctggacaatgcctccaagatcatgagcctgacaaagacggctccggactacctggtgggcagcaacccgccggaggacattaccaaaaatcggatctaccaaatcctggagctgaacgggtacgatccgcagtacgcggcctccgtcttcctgggctgggcgcaaaagaagttcgggaagaggaacaccatctggctctttgggccggccacgacgggtaaaaccaacatcgcggaagccatcgcccacgccgtgcccttctacggctgcgtaaactggaccaatgagaactttcccttcaacgattgcgtcgacaagatggtgatctggtgggaggagggcaagatgacggccaaggtcgtggagagcgccaaggccattctgggcggaagcaaggtgcgcgtggaccaaaagtgcaagtcatcggcccagatcgaacccactcccgtgatcgtcacctccaacaccaacatgtgcgccgtgattgacgggaacagcaccaccttcgagcatcagcagccgctgcaggaccggatgtttgaatttgaacttacccgccgtttggaccatgactttgggaaggtcaccaaacaggaagtaaaggactttttccggtgggcttccgatcacgtgactgacgtggctcatgagttctacgtcagaaagggtggagctaagaaacgccccgcctccaatgacgcggatgtaagcgagccaaaacgggagtgcacgtcacttgcgcagccgacaacgtcagacgcggaagcaccggcggactacgcggacaggtaccaaaacaaatgttctcgtcacgtgggcatgaatctgatgctttttccctgtaaaacatgcgagagaatgaatcaaatttccaatgtctgttttacgcatggtcaaagagactgtggggaatgcttccctggaatgtcagaatctcaacccgtttctgtcgtcaaaaagaagacttatcagaaactgtgtccaattcatcatatcctgggaagggcacccgagattgcctgttcggcctgcgatttggccaatgtggacttggatgactgtgtttctgagcaataaatgacttaaaccaggtatggctgctgacggttatcttccagattggctcgaggacaacctttctgaaggcattcgtgagtggtgggctctgaaacctggagtccctcaacccaaagcgaaccaacaacaccaggacaaccgtcggggtcttgtgcttccgggttacaaatacctcggacccggtaacggactcgacaaaggagagccggtcaacgaggcggacgcggcagccctcgaacacgacaaagcttacgaccagcagctcaaggccggtgacaacccgtacctcaagtacaaccacgccgacgccgagtttcaggagcgtcttcaagaagatacgtcttttgggggcaaccttggcagagcagtcttccaggccaaaaagaggatccttgagcctcttggtctggttgaggaagcagctaaaacggctcctggaaagaagggggctgtagatcagtctcctcaggaaccggactcatcatctggtgttggcaaatcgggcaaacagcctgccagaaaaagactaaatttcggtcagactggagactcagagtcagtcccagaccctcaacctctcggagaaccaccagcagcccccacaagtttgggatctaatacaatggcttcaggcggtggcgcaccaatggcagacaataacgagggtgccgatggagtgggtaattcctcaggaaattggcattgcgattcccaatggctgggcgacagagtcatcaccaccagcaccagaacctgggccctgcccacttacaacaaccatctctacaagcaaatctccagccaatcaggagcttcaaacgacaaccactactttggctacagcaccccttgggggtattttgactttaacagattccactgccacttctcaccacgtgactggcagcgactcattaacaacaactggggattccggcccaagaaactcagcttcaagctcttcaacatccaagttagaggggtcacgcagaacgatggcacgacgactattgccaataaccttaccagcacggttcaagtgtttacggactcggagtatcagctcccgtacgtgctcgggtcggcgcaccaaggctgtctcccgccgtttccagcggacgtcttcatggtccctcagtatggatacctcaccctgaacaacggaagtcaagcggtgggacgctcatccttttactgcctggagtacttcccttcgcagatgctaaggactggaaataacttccaattcagctataccttcgaggatgtaccttttcacagcagctacgctcacagccagagtttggatcgcttgatgaatcctcttattgatcagtatctgtactacctgaacagaacgcaaggaacaacctctggaacaaccaaccaatcacggctgctttttagccaggctgggcctcagtctatgtctttgcaggccagaaattggctacctgggccctgctaccggcaacagagactttcaaagactgctaacgacaacaacaacagtaactttccttggacagcggccagcaaatatcatctcaatggccgcgactcgctggtgaatccaggaccagctatggccagtcacaaggacgatgaagaaaaatttttccctatgcacggcaatctaatatttggcaaagaagggacaacggcaagtaacgcagaattagataatgtaatgattacggatgaagaagagattcgtaccaccaatcctgtggcaacagagcagtatggaactgtggcaaataacttgcagagctcaaatacagctcccacgactggaactgtcaatcatcagggggccttacctggcatggtgtggcaagatcgtgacgtgtaccttcaaggacctatctgggcaaagattcctcacacggatggacactttcatccttctcctctgatgggaggctttggactgaaacatccgcctcctcaaatcatgatcaaaaatactccggtaccggcaaatcctccgacgactttcagcccggccaagtttgcttcatttatcactcagtactccactggacaggtcagcgtggaaattgagtgggagctacagaaagaaaacagcaaacgttggaatccagagattcagtacacttccaactacaacaagtctgttaatgtggactttactgtagacactaatggtgtttatagtgaacctcgccctattggaacccggtatctcacacgaaacttgtgaatcctggttaatcaataaaccgtttaattcgtttcagttgaactttggctcttgtgcacttctttatctttatcttgtttccatggctactgcgtagataagcagcggcctgcggcgcttgcgcttcgcggtttacaactgctggttaatatttaactctcgccatacctctagtgatggagttggccactccctctatgcgcactcgctcgctcggtggggcctggcgaccaaaggtcgccagacggacgtgctttgcacgtccggccccaccgagcgagcgagtgcgcatagagggagtggccaa

SEQ ID NO: 3 - DNA, 4722 bp, Adeno-associated virus
tggccactccctctatgcgcactcgctcgctcggtggggcctggcgaccaaaggtcgccagacggacgtgctttgcacgtccggccccaccgagcgagcgagtgcgcatagagggagtggccaactccatcactagaggtatggcagtgacgtaacgcgaagcgcgcgaagcgagaccacgcctaccagctgcgtcagcagtcaggtgacccttttgcgacagtttgcgacaccacgtggccgctgagggtatatattctcgagtgagcgaaccaggagctccattttgaccgcgaaatttgaacgagcagcagccatgccggggttctacgagattgtcctgaaggtcccgagtgacctggacgagcacctgccgggcatttctaactcgtttgttaactgggtggccgagaaggaatgggagctgccgccggattctgacatggatccgaatctgattgagcaggcacccctgaccgtggccgaaaagcttcagcgcgagttcctggtggagtggcgccgcgtgagtaaggccccggaggccctcttttttgtccagttcgaaaagggggagacctacttccacctgcacgtgctgattgagaccatcggggtcaaatccatggtggtcggccgctacgtgagccagattaaagagaagctggtgacccgcatctaccgcggggtcgagccgcagcttccgaactggttcgcggtgaccaaaacgcgaaatggcgccgggggcgggaacaaggtggtggacgactgctacatccccaactacctgctccccaagacccagcccgagctccagtgggcgtggactaacatggaccagtatttaagcgcctgtttgaatctcgcggagcgtaaacggctggtggcgcagcatctgacgcacgtgtcgcagacgcaggagcagaacaaagagaatcagaaccccaattctgacgcgccggtcatcaggtcaaaaacctcagccaggtacatggagctggtcgggtggctggtggaccgcgggatcacgtcagaaaagcaatggattcaggaggaccaggcctcgtacatctccttcaacgccgcctccaactcgcggtcccagatcaaggccgcgctggacaatgcctccaagatcatgagcctgacaaagacggctccggactacctggtgggcagcaacccgccggaggacattaccaaaaatcggatctaccaaatcctggagctgaacgggtacgatccgcagtacgcggcctccgtcttcctgggctgggcgcaaaagaagttcgggaagaggaacaccatctggctctttgggccggccacgacgggtaaaaccaacatcgcggaagccatcgcccacgccgtgcccttctacggctgcgtaaactggaccaatgagaactttcccttcaacgattgcgtcgacaagatggtgatctggtgggaggagggcaagatgacggccaaggtcgtggagagcgccaaggccattctgggcggaagcaaggtgcgcgtggaccaaaagtgcaagtcatcggcccagatcgaacccactcccgtgatcgtcacctccaacaccaacatgtgcgccgtgattgacgggaacagcaccaccttcgagcatcagcagccgctgcaggaccggatgtttaaatttgaacttacccgccgtttggaccatgactttgggaaggtcaccaaacaggaagtaaaggactttttccggtgggcttccgatcacgtgactgacgtggctcatgagttctacgtcagaaagggtggagctaagaaacgccccgcctccaatgacgcggatgtaagcgagccaaaacggcagtgcacgtcacttgcgcagccgacaacgtcagacgcggaagcaccggcggactacgcggacaggtaccaaaacaaatgttctcgtcacgtgggcatgaatctgatgctttttccctgtaaaacatgcgagagaatgaatcaaatttccaatgtctgttttacgcatggtcaaagagactgtggggaatgcttccctggaatgtcagaatctcaacccgtttctgtcgtcaaaaagaagacttatcagaaactgtgtccaattcatcatatcctgggaagggcacccgagattgcctgttcggcctgcgatttggccaatgtggacttggatgactgtgtttctgagcaataaatgacttaaaccaggtatggctgctgacggttatcttccagattggctcgaggacaacctttctgaaggcattcgtgagtggtgggctctgaaacctggagtccctcaacccaaagcgaaccaacaacaccaggacaaccgtcggggtcttgtgcttccgggttacaaatacctcggacccggtaacggactcgacaaaggagagccggtcaacgaggcggacgcggcagccctcgaacacgacaaagcttacgaccagcagctcaaggccggtgacaacccgtacctcaagtacaaccacgccgacgccgagtttcaggagcgtcttcaagaagatacgtcttttgggggcaaccttggcagagcagtcttccaggccaaaaagaggatccttgagcctcttggtctggttgaggaagcagctaaaacggctcctggaaagaagaggcctgtagatcagtctcctcaggaaccggactcatcatctggtgttggcaaatcgggcaaacagcctgccagaaaaagactaaatttcggtcagactggcgactcagagtcagtcccagaccctcaacctctcggagaaccaccagcagcccccacaagtttgggatctaatacaatggcttcaggcggtggcgcaccaatggcagacaataacgagggtgccgatggagtgggtaattcctcaggaaattggcattgcgattcccaatggctgggcgacagagtcatcaccaccagcaccagaacctgggccctgcccacttacaacaaccatctctacaagcaaatctccagccaatcaggagcttcaaacgacaaccactactttggctacagcaccccttgggggtattttgactttaacagattccactgccacttctcaccacgtgactggcagcgactcattaacaacaactggggattccggcccaagaaactcagcttcaagctcttcaacatccaagttaaagaggtcacgcagaacgatggcacgacgactattgccaataaccttaccagcacggttcaagtgtttacggactcggagtatcagctcccgtacgtgctcgggtcggcgcaccaaggctgtctcccgccgtttccagcggacgtcttcatggtccctcagtatggatacctcaccctgaacaacggaagtcaagcggtgggacgctcatccttttactgcctggagtacttcccttcgcagatgctaaggactggaaataacttccaattcagctataccttcgaggatgtaccttttcacagcagctacgctcacagccagagtttggatcgcttgatgaatcctcttattgatcagtatctgtactacctgaacagaacgcaaggaacaacctctggaacaaccaaccaatcacggctgctttttagccaggctgggcctcagtctatgtctttgcaggccagaaattggctacctgggccctgctaccggcaacagagactttcaaagactgctaacgacaacaacaacagtaactttccttggacagcggccagcaaatatcatctcaatggccgcgactcgctggtgaatccaggaccagctatggccagtcacaaggacgatgaagaaaaatttttccctatgcacggcaatctaatatttggcaaagaagggacaacggcaagtaacgcagaattagataatgtaatgattacggatgaagaagagattcgtaccaccaatcctgtggcaacagagcagtatggaactgtggcaaataacttgcagagctcaaatacagctcccacgactagaactgtcaatgatcagggggccttacctggcatggtgtggcaagatcgtgacgtgtaccttcaaggacctatctgggcaaagattcctcacacggatggacactttcatccttctcctctgatgggaggctttggactgaaacatccgcctcctcaaatcatgatcaaaaatactccggtaccggcaaatcctccgacgactttcagcccggccaagtttgcttcatttatcactcagtactccactggacaggtcagcgtggaaattgagtgggagctacagaaagaaaacagcaaacgttggaatccagagattcagtacacttccaactacaacaagtctgttaatgtggactttactgtagacactaatggtgtttatagtgaacctcgccctattggaacccggtatctcacacgaaacttgtaatcctggttaatcaataaaccgtttaattcgtttcagttgaactttggctcttgtgcacttcttatcttatcttgtttccatggctactgcgtagataagcagcggcctgcggcgcttgcgcttcgcggtttacaactgctggttaatatttaactctcgccatacctctagtgatggagttggccactccctctatgcgcactcgctcgctcggtggggccggacgtgcaaagcacgtccgtctggcgacctttggtcgccaggccccaccgagcgagcgagtgcgcatagagggagtggccaa

SEQ ID NO: 4 - DNA, 4767 bp, Adeno-associated virus
ttggccactccctctatgcgcgctcgctcactcactcggccctggagaccaaaggtctccagactgccggcctctggccggcagggccgagtgagtgagcgagcgcgcatagagggagtggccaactccatcatctaggtttgcccactgacgtcaatgtgacgtcctagggttagggaggtccctgtattagcagtcacgtgagtgtcgtatttcgcggagcgtagcggagcgcataccaagctgccacgtcacagccacgtggtccgtttgcgacagtttgcgacaccatgtggtcaggagggtatataaccgcgagtgagccagcgaggagctccattttgcccgcgaattttgaacgagcagcagccatgccggggttctacgagatcgtgctgaaggtgcccagcgacctggacgagcacctgcccggcatttctgactcttttgtgagctgggtggccgagaaggaatgggagctgccgccggattctgacatggacttgaatctgattgagcaggcacccctgaccgtggccgaaaagctgcaacgcgagttcctggtcgagtggcgccgcgtgagtaaggccccggaggccctcttctttgtccagttcgagaagggggacagctacttccacctgcacatcctggtggagaccgtgggcgtcaaatccatggtggtgggccgctacgtgagccagattaaagagaagctggtgacccgcatctaccgcggggtcgagccgcagcttccgaactggttcgcggtgaccaagacgcgtaatggcgccggaggcgggaacaaggtggtggacgactgctacatccccaactacctgctccccaagacccagcccgagctccagtgggcgtggactaacatggaccagtatataagcgcctgtttgaatctcgcggagcgtaaacggctggtggcgcagcatctgacgcacgtgtcgcagacgcaggagcagaacaaggaaaaccagaaccccaattctgacgcgccggtcatcaggtcaaaaacctccgccaggtacatggagctggtcgggtggctggtggaccgcgggatcacgtcagaaaagcaatggatccaggaggaccaggcgtcctacatctccttcaacgccgcctccaactcgcggtcacaaatcaaggccgcgctggacaatgcctccaaaatcatgagcctgacaaagacggctccggactacctggtgggccagaacccgccggaggacatttccagcaaccgcatctaccgaatcctcgagatgaacgggtacgatccgcagtacgcggcctccgtcttcctgggctgggcgcaaaagaagttcgggaagaggaacaccatctggctctttgggccggccacgacgggtaaaaccaacatcgcggaagccatcgcccacgccgtgcccttctacggctgcgtgaactggaccaatgagaactttccgttcaacgattgcgtcgacaagatggtgatctggtgggaggagggcaagatgacggccaaggtcgtagagagcgccaaggccatcctgggcggaagcaaggtgcgcgtggaccaaaagtgcaagtcatcggcccagatcgacccaactcccgtgatcgtcacctccaacaccaacatgtgcgcggtcatcgacggaaactcgaccaccttcgagcaccaacaaccactccaggaccggatgttcaagttcgagctcaccaagcgcctggagcacgactttggcaaggtcaccaagcaggaagtcaaagactttttccggtgggcgtcagatcacgtgaccgaggtgactcacgagttttacgtcagaaagggtggagctagaaagaggcccgcccccaatgacgcagatataagtgagcccaagcgggcctgtccgtcagttgcgcagccatcgacgtcagacgcggaagctccggtggactacgcggacaggtaccaaaacaaatgttctcgtcacgtgggtatgaatctgatgctttttccctgccggcaatgcgagagaatgaatcagaatgtggacatttgcttcacgcacggggtcatggactgtgccgagtgcttccccgtgtcagaatctcaacccgtgtctgtcgtcagaaagcggacgtatcagaaactgtgtccgattcatcacatcatggggagggcgcccgaggtggcctgctcggcctgcgaactggccaatgtggacttggatgactgtgacatggaacaataaatgactcaaaccagatatgactgacggttaccttccagattggctagaggacaacctctctgaaggcgttcgagagtggtgggcgctgcaacctggagcccctaaacccaaggcaaatcaacaacatcaggacaacgctcggggtcttgtgcttccgggttacaaatacctcggacccggcaacggactcgacaagggggaacccgtcaacgcagcggacgcggcagccctcgagcacgacaaggcctacgaccagcagctcaaggccggtgacaacccctacctcaagtacaaccacgccgacgcggagttccagcagcggcttcagggcgacacatcgtttgggggcaacctcggcagagcagtcttccaggccaaaaagagggttcttgaacctcttggtctggttgagcaagcgggtgagacggctcctggaaagaagagaccgttgattgaatccccccagcagcccgactcctccacgggtatcggcaaaaaaggcaagcagccggctaaaaagaagctcgttttcgaagacgaaactggagcaggcgacggaccccctgagggatcaacttccggagccatgtctgatgacagtgagatgcgtgcagcagctggcggagctgcagtcgagggcggacaaggtgccgatggagtgggtaatgcctcgggtgattggcattgcgattccacctggtctgagggccacgtcacgaccaccagcaccagaacctgggtcttgcccacctacaacaaccacctctacaagcgactcggagagagcctgcagtccaacacctacaacggattctccaccccctggggatactttgacttcaaccgcttccactgccacttctcaccacgtgactggcagcgactcatcaacaacaactggggcatgcgacccaaagccatgcgggtcaaaatcttcaacatccaggtcaaggaggtcacgacgtcgaacggcgagacaacggtggctaataaccttaccagcacggttcagatctttgcggactcgtcgtacgaactgccgtacgtgatggatgcgggtcaagagggcagcctgcctccttttcccaacgacgtctttatggtgccccagtacggctactgtggactggtgaccggcaacacttcgcagcaacagactgacagaaatgccttctactgcctggagtactttccttcgcagatgctgcggactggcaacaactttgaaattacgtacagttttgagaaggtgcctttccactcgatgtacgcgcacagccagagcctggaccggctgatgaaccctctcatcgaccagtacctgtggggactgcaatcgaccaccaccggaaccaccctgaatgccgggactgccaccaccaactttaccaagctgcggcctaccaacttttccaactttaaaaagaactggctgcccgggccttcaatcaagcagcagggcttctcaaagactgccaatcaaaactacaagatccctgccaccgggtcagacagtctcatcaaatacgagacgcacagcactctggacggaagatggagtgccctgacccccggacctccaatggccacggctggacctgcggacagcaagttcagcaacagccagctcatctttgcggggcctaaacagaacggcaacacggccaccgtacccgggactctgatcttcacctctgaggaggagctggcagccaccaacgccaccgatacggacatgtggggcaacctacctggcggtgaccagagcaacagcaacctgccgaccgtggacagactgacagccttgggagccgtgcctggaatggtctggcaaaacagagacatttactaccagggtcccatttgggccaagattcctcataccgatggacactttcacccctcaccgctgattggtgggtttgggctgaaacacccgcctcctcaaatttttatcaagaacaccccggtacctgcgaatcctgcaacgaccttcagctctactccggtaaactccttcattactcagtacagcactggccaggtgtcggtgcagattgactgggagatccagaaggagcggtccaaacgctggaaccccgaggtccagtttacctccaactacggacagcaaaactctctgttgtgggctcccgatgcggctgggaaatacactgagcctagggctatcggtacccgctacctcacccaccacctgtaataacctgttaatcaataaaccggtttattcgtttcagttgaactttggtctccgtgtccttcttatcttatctcgtttccatggctactgcgtacataagcagcggcctgcggcgcttgcgcttcgcggtttacaactgccggttaatcagtaacttctggcaaaccagatgatggagttggccacattagctatgcgcgctcgctcactcactcggccctggagaccaaaggtctccagactgccggcctctggccggcagggccgagtgagtgagcgagcgcgcatagagggagtggccaa

SEQ ID NO: 5 - DNA, 4642 bp, Adeno-associated virus
ctctcccccctgtcgcgttcgctcgctcgctggctcgtttgggggggtggcagctcaaagagctgccagacgacggccctctggccgtcgcccccccaaacgagccagcgagcgagcgaacgcgacaggggggagagtgccacactctcaagcaagggggttttgtaagcagtgatgtcataatgatgtaatgcttattgtcacgcgatagttaatgattaacagtcatgtgatgtgttttatccaataggaagaaagcgcgcgtatgagttctcgcgagacttccggggtataaaagaccgagtgaacgagcccgccgccattctttgctctggactgctagaggaccctcgctgccatggctaccttctatgaagtcattgttcgcgtcccatttgacgtggaggaacatctgcctggaatttctgacagctttgtggactgggtaactggtcaaatttgggagctgcctccagagtcagatttaaatttgactctggttgaacagcctcagttgacggtggctgatagaattcgccgcgtgttcctgtacgagtggaacaaattttccaagcaggagtccaaattctttgtgcagtttgaaaagggatctgaatattttcatctgcacacgcttgtggagacctccggcatctcttccatggtcctcggccgctacgtgagtcagattcgcgcccagctggtgaaagtggtcttccagggaattgaaccccagatcaacgactgggtcgccatcaccaaggtaaagaagggcggagccaataaggtggtggattctgggtatattcccgcctacctgctgccgaaggtccaaccggagcttcagtgggcgtggacaaacctggacgagtataaattggccgccctgaatctggaggagcgcaaacggctcgtcgcgcagtttctggcagaatcctcgcagcgctcgcaggaggcggcttcgcagcgtgagttctcggctgacccggtcatcaaaagcaagacttcccagaaatacatggcgctcgtcaactggctcgtggagcacggcatcacttccgagaagcagtggatccaggaaaatcaggagagctacctctccttcaactccaccggcaactctcggagccagatcaaggccgcgctcgacaacgcgaccaaaattatgagtctgacaaaaagcgcggtggactacctcgtggggagctccgttcccgaggacatttcaaaaaacagaatctggcaaatttttgagatgaatggctacgacccggcctacgcgggatccatcctctacggctggtgtcagcgctccttcaacaagaggaacaccgtctggctctacggacccgccacgaccggcaagaccaacatcgcggaggccatcgcccacactgtgcccttttacggctgcgtgaactggaccaatgaaaactttccctttaatgactgtgtggacaaaatgctcatttggtgggaggagggaaagatgaccaacaaggtggttgaatccgccaaggccatcctggggggctcaaaggtgcgggtcgatcagaaatgtaaatcctctgttcaaattgattctacccctgtcattgtaacttccaatacaaacatgtgtgtggtggtggatgggaattccacgacctttgaacaccagcagccgctggaggaccgcatgttcaaatttgaactgactaagcggctcccgccagattttggcaagattactaagcaggaagtcaaggacttttttgcttgggcaaaggtcaatcaggtgccggtgactcacgagtttaaagttcccagggaattggcgggaactaaaggggcggagaaatctctaaaacgcccactgggtgacgtcaccaatactagctataaaagtctggagaagcgggccaggctctcatttgttcccgagacgcctcgcagttcagacgtgactgttgatcccgctcctctgcgaccgctcaattggaattcaaggtatgattgcaaatgtgactatcatgctcaatttgacaacatttctaacaaatgtgatgaatgtgaatatttgaatcggggcaaaaatggatgtatctgtcacaatgtaactcactgtcaaatttgtcatgggattcccccctgggaaaaggaaaacttgtcagattttggggattttgacgatgccaataaagaacagtaaataaagcgagtagtcatgtcttttgttgatcaccctccagattggttggaagaagttggtgaaggtcttcgcgagtttttgggccttgaagcgggcccaccgaaaccaaaacccaatcagcagcatcaagatcaagcccgtggtcttgtgctgcctggttataactatctcggacccggaaacggtctcgatcgaggagagcctgtcaacagggcagacgaggtcgcgcgagagcacgacatctcgtacaacgagcagcttgaggcgggagacaacccctacctcaagtacaaccacgcggacgccgagtttcaggagaagctcgccgacgacacatccttcgggggaaacctcggaaaggcagtctttcaggccaagaaaagggttctcgaaccttttggcctggttgaagagggtgctaagacggcccctaccggaaagcggatagacgaccactttccaaaaagaaagaaggctcggaccgaagaggactccaagccttccacctcgtcagacgccgaagctggacccagcggatcccagcagctgcaaatcccagcccaaccagcctcaagtttgggagctgatacaatgtctgcgggaggtggcggcccattgggcgacaataaccaaggtgccgatggagtgggcaatgcctcgggagattggcattgcgattccacgtggatgggggacagagtcgtcaccaagtccacccgaacctgggtgctgcccagctacaacaaccaccagtaccgagagatcaaaagcggctccgtcgacggaagcaacgccaacgcctactttggatacagcaccccctgggggtactttgactttaaccgcttccacagccactggagcccccgagactggcaaagactcatcaacaactactggggcttcagaccccggtccctcagagtcaaaatcttcaacattcaagtcaaagaggtcacggtgcaggactccaccaccaccatcgccaacaacctcacctccaccgtccaagtgtttacggacgacgactaccagctgccctacgtcgtcggcaacgggaccgagggatgcctgccggccttccctccgcaggtctttacgctgccgcagtacggttacgcgacgctgaaccgcgacaacacagaaaatcccaccgagaggagcagcttcttctgcctagagtactttcccagcaagatgctgagaacgggcaacaactttgagtttacctacaactttgaggaggtgcccttccactccagcttcgctcccagtcagaacctgttcaagctggccaacccgctggtggaccagtacttgtaccgcttcgtgagcacaaataacactggcggagtccagttcaacaagaacctggccgggagatacgccaacacctacaaaaactggttcccggggcccatgggccgaacccagggctggaacctgggctccggggtcaaccgcgccagtgtcagcgccttcgccacgaccaataggatggagctcgagggcgcgagttaccaggtgcccccgcagccgaacggcatgaccaacaacctccagggcagcaacacctatgccctggagaacactatgatcttcaacagccagccggcgaacccgggcaccaccgccacgtacctcgagggcaacatgctcatcaccagcgagagcgagacgcagccggtgaaccgcgtggcgtacaacgtcggcgggcagatggccaccaacaaccagagctccaccactgcccccgcgaccggcacgtacaacctccaggaaatcgtgcccggcagcgtgtggatggagagggacgtgtacctccaaggacccatctgggccaagatcccagagacgggggcgcactttcacccctctccggccatgggcggattcggactcaaacacccaccgcccatgatgctcatcaagaacacgcctgtgcccggaaatatcaccagcttctcggacgtgcccgtcagcagcttcatcacccagtacagcaccgggcaggtcaccgtggagatggagtgggagctcaagaaggaaaactccaagaggtggaacccagagatccagtacacaaacaactacaacgacccccagtttgtggactttgccccggacagcaccggggaatacagaaccaccagacctatcggaacccgataccttacccgacccctttaacccattcatgtcgcataccctcaataaaccgtgtattcgtgtcagtaaaatactgcctcttgtggtcattcaatgaataacagcttacaacatctacaaaacctccttgcttgagagtgtggcactctcccccctgtcgcgttcgctcgctcgctggctcgtttgggggggtggcagctcaaagagctgccagacgacggccctctggccgtcgcccccccaaacgagccagcgagcgagcgaacgcgacaggggggagag

SEQ ID NO: 6 - DNA, 4404 bp, Adeno-associated virus
cgcgacaggggggagagtgccacactctcaagcaagggggttttgtaagcagtgatgtcataatgatgtaatgcttattgtcacgcgatagttaatgattaacagtcatgtgatgtgttttatccaataggaagaaagcgcgcgtatgagttctcgcgagacttccggggtataaaagaccgagtgaacgagcccgccgccattctttgctctggactgctagaggaccctcgctgccatggctaccttctatgaagtcattgttcgcgtcccatttgacgtggaggaacatctgcctggaatttctgacagctttgtggactgggtaactggtcaaatttgggagctgcctccagagtcagatttaaatttgactctggttgaacagcctcagttgacggtggctgatagaattcgccgcgtgttcctgtacgagtggaacaaattttccaagcaggagtccaaattctttgtgcagtttgaaaagggatctgaatattttcatctgcacacgcttgtggagacctccggcatctcttccatggtcctcggccgctacgtgagtcagattcgcgcccagctggtgaaagtggtcttccagggaattgaaccccagatcaacgactgggtcgccatcaccaaggtaaagaagggcggagccaataaggtggtggattctgggtatattcccgcctacctgctgccgaaggtccaaccggagcttcagtgggcgtggacaaacctggacgagtataaattggccgccctgaatctggaggagcgcaaacggctcgtcgcgcagtttctggcagaatcctcgcagcgctcgcaggaggcggcttcgcagcgtgagttctcggctgacccggtcatcaaaagcaagacttcccagaaatacatggcgctcgtcaactggctcgtggagcacggcatcacttccgagaagcagtggatccaggaaaatcaggagagctacctctccttcaactccaccggcaactctcggagccagatcaaggccgcgctcgacaacgcgaccaaaattatgagtctgacaaaaagcgcggtggactacctcgtggggagctccgttcccgaggacatttcaaaaaacagaatctggcaaatttttgagatgaatggctacgacccggcctacgcgggatccatcctctacggctggtgtcagcgctccttcaacaagaggaacaccgtctggctctacggacccgccacgaccggcaagaccaacatcgcggaggccatcgcccacactgtgcccttttacggctgcgtgaactggaccaatgaaaactttccctttaatgactgtgtggacaaaatgctcatttggtgggaggagggaaagatgaccaacaaggtggttgaatccgccaaggccatcctggggggctcaaaggtgcgggtcgatcagaaatgtaaatcctctgttcaaattgattctacccctgtcattgtaacttccaatacaaacatgtgtgtggtggtggatgggaattccacgacctttgaacaccagcagccgctggaggaccgcatgttcaaatttgaactgactaagcggctcccgccagattttggcaagattactaagcaggaagtcaaggacttttttgcttgggcaaaggtcaatcaggtgccggtgactcacgagtttaaagttcccagggaattggcgggaactaaaggggcggagaaatctctaaaacgcccactgggtgacgtcaccaatactagctataaaagtctggagaagcgggccaggctctcatttgttcccgagacgcctcgcagttcagacgtgactgttgatcccgctcctctgcgaccgctcaattggaattcaaggtatgattgcaaatgtgactatcatgctcaatttgacaacatttctaacaaatgtgatgaatgtgaatatttgaatcggggcaaaaatggatgtatctgtcacaatgtaactcactgtcaaatttgtcatgggattcccccctgggaaaaggaaaacttgtcagattttggggattttgacgatgccaataaagaacagtaaataaagcgagtagtcatgtcttttgttgatcaccctccagattggttggaagaagttggtgaaggtcttcgcgagtttttgggccttgaagcgggcccaccgaaaccaaaacccaatcagcagcatcaagatcaagcccgtggtcttgtgctgcctggttataactatctcggacccggaaacggtctcgatcgaggagagcctgtcaacagggcagacgaggtcgcgcgagagcacgacatctcgtacaacgagcagcttgaggcgggagacaacccctacctcaagtacaaccacgcggacgccgagtttcaggagaagctcgccgacgacacatccttcgggggaaacctcggaaaggcagtctttcaggccaagaaaagggttctcgaaccttttggcctggttgaagagggtgctaagacggcccctaccggaaagcggatagacgaccactttccaaaaagaaagaaggctcggaccgaagaggactccaagccttccacctcgtcagacgccgaagctggacccagcggatcccagcagctgcaaatcccagcccaaccagcctcaagtttgggagctgatacaatgtctgcgggaggtggcggcccattgggcgacaataaccaaggtgccgatggagtgggcaatgcctcgggagattggcattgcgattccacgtggatgggggacagagtcgtcaccaagtccacccgaacctgggtgctgcccagctacaacaaccaccagtaccgagagatcaaaagcggctccgtcgacggaagcaacgccaacgcctactttggatacagcaccccctgggggtactttgactttaaccgcttccacagccactggagcccccgagactggcaaagactcatcaacaactactggggcttcagaccccggtccctcagagtcaaaatcttcaacattcaagtcaaagaggtcacggtgcaggactccaccaccaccatcgccaacaacctcacctccaccgtccaagtgtttacggacgacgactaccagctgccctacgtcgtcggcaacgggaccgagggatgcctgccggccttccctccgcaggtctttacgctgccgcagtacggttacgcgacgctgaaccgcgacaacacagaaaatcccaccgagaggagcagcttcttctgcctagagtactttcccagcaagatgctgagaacgggcaacaactttgagtttacctacaactttgaggaggtgcccttccactccagcttcgctcccagtcagaacctcttcaagctggccaacccgctggtggaccagtacttgtaccgcttcgtgagcacaaataacactggcggagtccagttcaacaagaacctggccgggagatacgccaacacctacaaaaactggttcccggggcccatgggccgaacccagggctggaacctgggctccggggtcaaccgcgccagtgtcagcgccttcgccacgaccaataggatggagctcgagggcgcgagttaccaggtgcccccgcagccgaacggcatgaccaacaacctccagggcagcaacacctatgccctggagaacactatgatcttcaacagccagccggcgaacccgggcaccaccgccacgtacctcgagggcaacatgctcatcaccagcgagagcgagacgcagccggtgaaccgcgtggcgtacaacgtcggcgggcagatggccaccaacaaccagagctccaccactgcccccgcgaccggcacgtacaacctccaggaaatcgtgcccggcagcgtgtggatggagagggacgtgtacctccaaggacccatctgggccaagatcccagagacgggggcgcactttcacccctctccggccatgggcggattcggactcaaacacccaccgcccatgatgctcatcaagaacacgcctgtgcccggaaatatcaccagcttctcggacgtgcccgtcagcagcttcatcacccagtacagcaccgggcaggtcaccgtggagatggagtgggagctcaagaaggaaaactccaagaggtggaacccagagatccagtacacaaacaactacaacgacccccagtttgtggactttgccccggacagcaccggggaatacagaaccaccagacctatcggaacccgataccttacccgacccctttaacccattcatgtcgcataccctcaataaaccgtgtattcgtgtcagtaaaatactgcctcttgtggtcattcaatgaataacagcttacaacatctacaaaacctccttgcttgagagtgtggcactctcccccctgtcgcgcg

SEQ ID NO: 7 - DNA, 4636 bp, Adeno-associated virus
ctctcccccctgtcgcgttcgctcgctcgctggctcgtttgggggggtggcagctcaaagagctgccagacgacggccctctggccgtcgcccccccaaacgagccagcgagcgagcgaacgcgacaggggggagagtgccacactctcaagcaaggaggttttgtaagtggtgatgtcatatagttgtcacgcgatagttaatgattaacagtcaggtgatgtgtgttatccaataggatgaaagcgcgcgcatgagttctcgcgagacttccggggtataaaggggtgagtgaacgagcccgccgccattctctgctctgaactgctagaggaccctcgctgccatggctaccttctacgaagtcattgttcgcgtcccatttgacgtggaggaacatctgcctggaatttctgacagctttgtggactgggtaactggtcaaatttgggagctgcctcccgagtcagatttgaatttgactctgattgagcagcctcagctgacggttgctgacagaattcgccgcgtgttcctgtacgagtggaacaaattttccaagcaggaatccaaattctttgtgcagtttgaaaagggatctgaatattttcatctgcacacgcttgtggagacctccggcatctcttccatggtcctaggccgctacgtgagtcagattcgcgcccagctggtgaaagtggtcttccagggaatcgagccacagatcaacgactgggtcgccatcaccaaggtaaagaagggcggagccaataaggtggtggattctgggtatattcccgcctacctgctgccgaaggtccaaccggagcttcagtgggcgtggacaaacctggacgagtataaattggccgccctgaacctggaggagcgcaaacggctcgtcgcgcagtttctggcagaatcctcgcagcgctcgcaggaggcggcttcgcagcgtgagttctcggctgacccggtcatcaaaagcaagacttcccagaaatacatggcgctcgtcaactggctcgtggagcacggcatcacttccgagaagcagtggatccaggagaatcaggagagctacctctccttcaactccacgggcaactctcggagccaaatcaaggccgcgctcgacaacgcgaccaaaatcatgagtctgacaaaaagcgcggtggactacctcgtggggagctccgttcccgaggacatttcaaaaaacagaatctggcaaatttttgagatgaacggctacgacccggcctacgcgggatccatcctctacggctggtgtcagcgctccttcaacaagaggaacaccgtctggctctacggacccgccacgaccggcaagaccaacatcgcggaggccatcgcccacactgtgcccttttacggctgcgtgaactggaccaatgaaaactttccctttaatgactgtgtggacaaaatgctcatttggtgggaggagggaaagatgaccaacaaggtggttgaatccgccaaggccatcctggggggctccaaggtgcgggtcgatcagaaatgtaaatcctctgttcaaattgattctacccccgtcattgtaacttccaatacaaacatgtgtgtggtggtggatgggaattccacgacctttgaacaccagcagccgctggaggaccgcatgttcaaatttgaactgactaagcggctcccgccagattttggcaagattactaagcaggaagtcaaagacttttttgcttgggcaaaggtcaatcaggtgccggtgactcacgagtttaaagttcccagggaattggcgggaactaaaggggcggagaaatctctaaaacgcccactgggtgacgtcaccaatactagctataaaagtccagagaagcgggcccggctctcatttgttcccgagacgcctcgcagttcagacgtgactgtcgatcccgctcctctgcgaccgctcaattggaattcaaggtatgattgcaaatgtgaccatcatgctcaatttgacaacatttctgacaaatgtgatgaatgtgaatatttgaatcggggcaaaaatggatgtatctgtcacaatgtaactcactgtcaaatttgtcacgggattcccccctgggagaaggaaaacttgtcagattttggggattttgacgatgccaataaagaacagtaaataaagcgagtagtcatgtcttttgttgatcaccctccagattggttggaagaagttggtgaaggtcttcgcgagtttttgggccttgaagcgggcccaccgaaaccgaaacccaatcagcagcatcaagatcaagcccgtggtcttgtgctgcctggttataactatctcggacccggaaacggtctcgatcgaggagagcctgtcaacagggcagacgaggtcgcgcgagagcacgacatctcgtacaacgagcagcttgaggcgggagacaacccctacctcaagtacaaccacgcggacgccgagtttcaggagaagctcgccgacgacacatccttcgggggaaacctcggaaaggcagtctttcaggccaagaaaagggttctcgaaccttttggcctggttgaagagggtgctaagacggcccctaccggaaagcggatagacgaccactttccaaaaagaaagaaggctcggaccgaagaggactccaagccttccacctcgtcagacgccgaagctggacccagcggatcccagcagctgcaaatcccagcacaaccagcctcaagtttgggagctgatacaatgtctgcgggaggtggcggcccattgggcgacaataaccaaggtgccgatggagtgggcaatgcctcgggagattggcattgcgattccacgtggatgggggacagagtcgtcaccaagtccacccgcacctgggtgctgcccagctacaacaaccaccagtaccgagagatcaaaagcggctccgtcgacggaagcaacgccaacgcctactttggatacagcaccccctgggggtactttgactttaaccgcttccacagccactggagcccccgagactggcaaagactcatcaacaactattggggcttcagaccccggtctctcagagtcaaaatcttcaacatccaagtcaaagaggtcacggtgcaggactccaccaccaccatcgccaacaacctcacctccaccgtccaagtgtttacggacgacgactaccaactcccgtacgtcgtcggcaacgggaccgagggatgcctgccggccttccccccgcaggtctttacgctgccgcagtacggctacgcgacgctgaaccgagacaacggagacaacccgacagagcggagcagcttcttttgcctagagtactttcccagcaagatgctgaggacgggcaacaactttgagtttacctacagctttgaagaggtgcccttccactgcagcttcgccccgagccagaacctctttaagctggccaacccgctggtggaccagtacctgtaccgcttcgtgagcacctcggccacgggcgccatccagttccaaaagaacctggcgggcagatacgccaacacctacaaaaactggttcccggggcccatgggccgaacccagggctggaacacgagctctggcagcagcaccaacagagtcagcgtcaacaacttttccgtctcaaaccggatgaacctggagggggccagctaccaagtgaacccccagcccaacgggatgacaaacacgctccaaggcagcaaccgctacgcgctggaaaacaccatgatcttcaacgctcaaaacgccacgccgggaactacctcggtgtacccagaggacaatctactgctgaccagcgagagcgagactcagcccgtcaaccgggtggcttacaacacgggcggtcagatggccaccaacgcccagaacgccaccacggctcccacggtcgggacctacaacctccaggaagtgcttcctggcagcgtatggatggagagggacgtgtacctccaaggacccatctgggccaagatcccagagacgggggcgcactttcacccctctccggccatgggcggattcggactcaaacacccgccgcccatgatgctcatcaaaaacacgccggtgcccggcaacatcaccagcttctcggacgtgcccgtcagcagcttcatcacccagtacagcaccgggcaggtcaccgtggagatggaatgggagctcaaaaaggaaaactccaagaggtggaacccagagatccagtacaccaacaactacaacgacccccagtttgtggactttgctccagacggctccggcgaatacagaaccaccagagccatcggaacccgatacctcacccgacccctttaacccattcatgtcgcataccctcaataaaccgtgtattcgtgtcagtgaaatactgcctcttgtggtcattcaatgaacatcagcttacaacatctacaaaacccccttgcttgagagtgtggcactctcccccctgtcgcgttcgctcgctcgctggctcgtttgggggggtggcagctcaaagagctgccagacgacggccctctggccgtcgcccccccaaacgagccagcgagcgagcgaacgcgacaggggggagag

SEQ ID NO: 8 - DNA, 4683 bp, Adeno-associated virus
ttggccactccctctctgcgcgctcgctcgctcactgaggccgggcgaccaaaggtcgcccgacgcccgggctttgcccgggcggcctcagtgagcgagcgagcgcgcagagagggagtggccaactccatcactaggggttcctggaggggtggagtcgtgacgtgaattacgtcatagggttagggaggtcctgtattagaggtcacgtgagtgttttgcgacattttgcgacaccatgtggtcacgctgggtatttaagcccgagtgagcacgcagggtctccattttgaagcgggaggtttgaacgcgcagcgccatgccggggttttacgagattgtgattaaggtccccagcgaccttgacgagcatctgcccggcatttctgacagctttgtgaactgggtggccgagaaggaatgggagttgccgccagattctgacatggatctgaatctgattgagcaggcacccctgaccgtggccgagaagctgcagcgcgacttcctggtccagtggcgccgcgtgagtaaggccccggaggccctcttctttgttcagttcgagaagggcgagtcctacttccacctccatattctggtggagaccacgggggtcaaatccatggtgctgggccgcttcctgagtcagattagggacaagctggtgcagaccatctaccgcgggatcgagccgaccctgcccaactggttcgcggtgaccaagacgcgtaatggcgccggaggggggaacaaggtggtggacgagtgctacatccccaactacctcctgcccaagactcagcccgagctgcagtgggcgtggactaacatggaggagtatataagcgcgtgtttaaacctggccgagcgcaaacggctcgtggcgcacgacctgacccacgtcagccagacccaggagcagaacaaggagaatctgaaccccaattctgacgcgcctgtcatccggtcaaaaacctccgcacgctacatggagctggtcgggtggctggtggaccggggcatcacctccgagaagcagtggatccaggaggaccaggcctcgtacatctccttcaacgccgcctccaactcgcggtcccagatcaaggccgctctggacaatgccggcaagatcatggcgctgaccaaatccgcgcccgactacctggtaggccccgctccgcccgccgacattaaaaccaaccgcatttaccgcatcctggagctgaacggctacgaccctgcctacgccggctccgtctttctcggctgggcccagaaaaggttcggaaaacgcaacaccatctggctgtttgggccggccaccacgggcaagaccaacatcgcggaagccatcgcccacgccgtgcccttctacggctgcgtcaactggaccaatgagaactttcccttcaacgattgcgtcgacaagatggtgatctggtgggaggagggcaagatgacggccaaggtcgtggagtccgccaaggccattctcggcggcagcaaggtgcgcgtggaccaaaagtgcaagtcgtccgcccagatcgatcccacccccgtgatcgtcacctccaacaccaacatgtgcgccgtgattgacgggaacagcaccaccttcgagcaccagcagccgttgcaggaccggatgttcaaatttgaactcacccgccgtctggagcatgactttggcaaggtgacaaagcaggaagtcaaagagttcttccgctgggcgcaggatcacgtgaccgaggtggcgcatgagttctacgtcagaaagggtggagccaacaagagacccgcccccgatgacgcggataaaagcgagcccaagcgggcctgcccctcagtcgcggatccatcgacgtcagacgcggaaggagctccggtggactttgccgacaggtaccaaaacaaatgttctcgtcacgcgggcatgcttcagatgctgtttccctgcaaaacatgcgagagaatgaatcagaatttcaacatttgcttcacgcacgggaccagagactgttcagaatgtttccccggcgtgtcagaatctcaaccggtcgtcagaaagaggacgtatcggaaactctgtgccattcatcatctgctggggcgggctcccgagattgcttgctcggcctgcgatctggtcaacgtggatctggatgactgtgtttctgagcaataaatgacttaaaccaggtatggctgccgatggttatcttccagattggctcgaggacaacctctctgagggcattcgcgagtggtgggacttgaaacctggagccccgaaacccaaagccaaccagcaaaagcaggacgacggccggggtctggtgcttcctggctacaagtacctcggacccttcaacggactcgacaagggggagcccgtcaacgcggcggatgcagcggccctcgagcacgacaaggcctacgaccagcagctcaaagcgggtgacaatccgtacctgcggtataaccacgccgacgccgagtttcaggagcgtctgcaagaagatacgtcttttgggggcaacctcgggcgagcagtcttccaggccaagaagagggttctcgaaccttttggtctggttgaggaaggtgctaagacggctcctggaaagaaacgtccggtagagcagtcgccacaagagccagactcctcctcgggcattggcaagacaggccagcagcccgctaaaaagagactcaattttggtcagactggcgactcagagtcagtccccgacccacaacctctcggagaacctccagcaacccccgctgctgtgggacctactacaatggcttcaggcggtggcgcaccaatggcagacaataacgaaggcgccgacggagtgggtaatgcctcaggaaattggcattgcgattccacatggctgggcgacagagtcatcaccaccagcacccgaacatgggccttgcccacctataacaaccacctctacaagcaaatctccagtgcttcaacgggggccagcaacgacaaccactacttcggctacagcaccccctgggggtattttgatttcaacagattccactgccatttctcaccacgtgactggcagcgactcatcaacaacaattggggattccggcccaagagactcaacttcaagctcttcaacatccaagtcaaggaggtcacgacgaatgatggcgtcacgaccatcgctaataaccttaccagcacggttcaagtcttctcggactcggagtaccagttgccgtacgtcctcggctctgcgcaccagggctgcctccctccgttcccggcggacgtgttcatgattccgcagtacggctacctaacgctcaacaatggcagccaggcagtgggacggtcatccttttactgcctggaatatttcccatcgcagatgctgagaacgggcaataactttaccttcagctacaccttcgaggacgtgcctttccacagcagctacgcgcacagccagagcctggaccggctgatgaatcctctcatcgaccagtacctgtattacctgaacagaactcagaatcagtccggaagtgcccaaaacaaggacttgctgtttagccgggggtctccagctggcatgtctgttcagcccaaaaactggctacctggaccctgttaccggcagcagcgcgtttctaaaacaaaaacagacaacaacaacagcaactttacctggactggtgcttcaaaatataaccttaatgggcgtgaatctataatcaaccctggcactgctatggcctcacacaaagacgacaaagacaagttctttcccatgagcggtgtcatgatttttggaaaggagagcgccggagcttcaaacactgcattggacaatgtcatgatcacagacgaagaggaaatcaaagccactaaccccgtggccaccgaaagatttgggactgtggcagtcaatctccagagcagcagcacagaccctgcgaccggagatgtgcatgttatgggagccttacctggaatggtgtggcaagacagagacgtatacctgcagggtcctatttgggccaaaattcctcacacggatggacactttcacccgtctcctctcatgggcggctttggacttaagcacccgcctcctcagatcctcatcaaaaacacgcctgttcctgcgaatcctccggcagagttttcggctacaaagtttgcttcattcatcacccagtattccacaggacaagtgagcgtggagattgaatgggagctgcagaaagaaaacagcaaacgctggaatcccgaagtgcagtatacatctaactatgcaaaatctgccaacgttgatttcactgtggacaacaatggactttatactgagcctcgccccattggcacccgttacctcacccgtcccctgtaattgtgtgttaatcaataaaccggttaattcgtgtcagttgaactttggtctcatgtcgttattatcttatctggtcaccatagcaaccggttacacattaactgcttagttgcgcttcgcgaatacccctagtgatggagttgcccactccctctatgcgcgctcgctcgctcggtggggccggcagagcagagctctgccgtctgcggacctttggtccgcaggccccaccgagcgagcgagcgcgcatagagggagtgggcaa

SEQ ID NO: 9 - DNA, 4721 bp, Adeno-associated virus
ttggccactccctctatgcgcgctcgctcgctcggtggggcctgcggaccaaaggtccgcagacggcagagctctgctctgccggccccaccgagcgagcgagcgcgcatagagggagtggccaactccatcactaggggtaccgcgaagcgcctcccacgctgccgcgtcagcgctgacgtaaatcacgtcataggggagtggtcctgtattagctgtcacgtgagtgcttttgcgacattttgcgacaccacgtggccatttgaggtatatatggccgagtgagcgagcaggatctccattttgaccgcgaaatttgaacgagcagcagccatgccgggtttctacgagatcgtgatcaaggtgccgagcgacctggacgagcacctgccgggcatttctgactcgtttgtgaactgggtggccgagaaggaatgggagctgcccccggattctgacatggatctgaatctgatcgagcaggcacccctgaccgtggccgagaagctgcagcgcgacttcctggtccaatggcgccgcgtgagtaaggccccggaggccctgttctttgttcagttcgagaagggcgagagctacttccaccttcacgttctggtggagaccacgggggtcaagtccatggtgctaggccgcttcctgagtcagattcgggagaagctggtccagaccatctaccgcggggtcgagcccacgctgcccaactggttcgcggtgaccaagacgcgtaatggcgccggcggggggaacaaggtggtggacgagtgctacatccccaactacctcctgcccaagacccagcccgagctgcagtgggcgtggactaacatggaggagtatataagcgcgtgtttgaacctggccgaacgcaaacggctcgtggcgcagcacctgacccacgtcagccagacgcaggagcagaacaaggagaatctgaaccccaattctgacgcgcccgtgatcaggtcaaaaacctccgcgcgctacatggagctggtcgggtggctggtggaccggggcatcacctccgagaagcagtggatccaggaggaccaggcctcgtacatctccttcaacgccgcctccaactcgcggtcccagatcaaggccgcgctggacaatgccggcaagatcatggcgctgaccaaatccgcgcccgactacctggtggggccctcgctgcccgcggacattaaaaccaaccgcatctaccgcatcctggagctgaacgggtacgatcctgcctacgccggctccgtctttctcggctgggcccagaaaaagttcgggaagcgcaacaccatctggctgtttgggcccgccaccaccggcaagaccaacattgcggaagccatcgcccacgccgtgcccttctacggctgcgtcaactggaccaatgagaactttcccttcaacgattgcgtcgacaagatggtgatctggtgggaggagggcaagatgacggccaaggtcgtggagtccgccaaggccattctcggcggcagcaaggtgcgcgtggaccaaaagtgcaagtcgtccgcccagatcgaccccacccccgtgatcgtcacctccaacaccaacatgtgcgccgtgattgacgggaacagcaccaccttcgagcaccagcagccgttgcaggaccggatgttcaaatttgaactcacccgccgtctggagcacgactttggcaaggtgacgaagcaggaagtcaaagagttcttccgctgggccagtgatcacgtgaccgaggtggcgcatgagttctacgtcagaaagggcggagccagcaaaagacccgcccccgatgacgcggatataagcgagcccaagcgggcctgcccctcagtcgcggatccatcgacgtcagacgcggaaggagctccggtggactttgccgacaggtaccaaaacaaatgttctcgtcacgcgggcatgattcagatgctgtttccctgcaaaacgtgcgagagaatgaatcagaatttcaacatttgcttcacacacggggtcagagactgtttagagtgtttccccggcgtgtcagaatctcaaccggtcgtcagaaaaaagacgtatcggaaactctgcgcgattcatcatctgctggggcgggcgcccgagattgcttgctcggcctgcgacctggtcaacgtggacctggacgactgcgtttctgagcaataaatgacttaaaccaggtatggctgccgatggttatcttccagattggctcgaggacaacctctctgagggcattcgcgagtggtgggacctgaaacctggagccccgaaacccaaagccaaccagcaaaagcaggacaacggccggggtctggtgcttcctggctacaagtacctcggacccttcaacggactcgacaagggggagcccgtcaacgcggcggacgcagcggccctcgagcacgacaaggcctacgaccagcagctcaaagcgggtgacaatccgtacctgcggtataaccacgccgacgccgagtttcaggagcgtctgcaagaagatacgtcatttgggggcaacctcgggcgagcagtcttccaggccaagaagcgggttctcgaacctctcggtctggttgaggaaggcgctaagacggctcctgcaaagaagagaccggtagagccgtcacctcagcgttcccccgactcctccacgggcatcggcaagaaaggccagcagcccgccagaaagagactcaatttcggtcagactggcgactcagagtcagtccccgaccctcaacctctcggagaacctccagcagcgccctctagtgtgggatctggtacagtggctgcaggcggtggcgcaccaatggcagacaataacgaaggtgccgacggagtgggtaatgcctcaggaaattggcattgcgattccacatggctgggcgacagagtcattaccaccagcacccgaacctgggccctgcccacctacaacaaccacctctacaagcaaatctccagtgaaactgcaggtagtaccaacgacaacacctacttcggctacagcaccccctgggggtattttgactttaacagattccactgccacttctcaccacgtgactggcagcgactcatcaacaacaactggggattccggcccaagaagctgcggttcaagctcttcaacatccaggtcaaggaggtcacgacgaatgacggcgttacgaccatcgctaataaccttaccagcacgattcaggtattctcggactcggaataccagctgccgtacgtcctcggctctgcgcaccagggctgcctgcctccgttcccggcggacgtcttcatgattcctcagtacggctacctgactctcaacaatggcagtcagtctgtgggacgttcctccttctactgcctggagtacttcccctctcagatgctgagaacgggcaacaactttgagttcagctacagcttcgaggacgtgcctttccacagcagctacgcacacagccagagcctggaccggctgatgaatcccctcatcgaccagtacttgtactacctggccagaacacagagtaacccaggaggcacagctggcaatcgggaactgcagttttaccagggcgggccttcaactatggccgaacaagccaagaattggttacctggaccttgcttccggcaacaaagagtctccaaaacgctggatcaaaacaacaacagcaactttgcttggactggtgccaccaaatatcacctgaacggcagaaactcgttggttaatcccggcgtcgccatggcaactcacaaggacgacgaggaccgctttttcccatccagcggagtcctgatttttggaaaaactggagcaactaacaaaactacattggaaaatgtgttaatgacaaatgaagaagaaattcgtcctactaatcctgtagccacggaagaatacgggatagtcagcagcaacttacaagcggctaatactgcagcccagacacaagttgtcaacaaccagggagccttacctggcatggtctggcagaaccgggacgtgtacctgcagggtcccatctgggccaagattcctcacacggatggcaactttcacccgtctcctttgatgggcggctttggacttaaacatccgcctcctcagatcctgatcaagaacactcccgttcccgctaatcctccggaggtgtttactcctgccaagtttgcttcgttcatcacacagtacagcaccggacaagtcagcgtggaaatcgagtgggagctgcagaaggaaaacagcaagcgctggaacccggagattcagtacacctccaactttgaaaagcagactggtgtggactttgccgttgacagccagggtgtttactctgagcctcgccctattggcactcgttacctcacccgtaatctgtaattgcatgttaatcaataaaccggttgattcgtttcagttgaactttggtctcctgtgcttcttatcttatcggtttccatagcaactggttacacattaactgcttgggtgcgcttcacgataagaacactgacgtcaccgcggtacccctagtgatggagttggccactccctctatgcgcgctcgctcgctcggtggggcctgcggaccaaaggtccgcagacggcagagctctgctctgccggccccaccgagcgagcgagcgcgcatagagggagtggccaa

SEQ ID NO: 10 - DNA, 4393 bp, Adeno-associated virus
cagagagggagtggccaactccatcactaggggtagcgcgaagcgcctcccacgctgccgcgtcagcgctgacgtaaattacgtcataggggagtggtcctgtattagctgtcacgtgagtgcttttgcggcattttgcgacaccacgtggccatttgaggtatatatggccgagtgagcgagcaggatctccattttgaccgcgaaatttgaacgagcagcagccatgccgggcttctacgagatcgtgatcaaggtgccgagcgacctggacgagcacctgccgggcatttctgactcgtttgtgaactgggtggccgagaaggaatgggagctgcccccggattctgacatggatcggaatctgatcgagcaggcacccctgaccgtggccgagaagctgcagcgcgacttcctggtccaatggcgccgcgtgagtaaggccccggaggccctcttctttgttcagttcgagaagggcgagagctactttcacctgcacgttctggtcgagaccacgggggtcaagtccatggtgctaggccgcttcctgagtcagattcgggaaaagcttggtccagaccatctacccgcggggtcgagccccaccttgcccaactggttcgcggtgaccaaagacgcggtaatggcgccggcgggggggaacaaggtggtggacgagtgctacatccccaactacctcctgcccaagactcagcccgagctgcagtgggcgtggactaacatggaggagtatataagcgcgtgcttgaacctggccgagcgcaaacggctcgtggcgcagcacctgacccacgtcagccagacgcaggagcagaacaaggagaatctgaaccccaattctgacgcgcccgtgatcaggtcaaaaacctccgcgcgctatatggagctggtcgggtggctggtggaccggggcatcacctccgagaagcagtggatccaggaggaccaggcctcgtacatctccttcaacgccgcctccaactcgcggtcccagatcaaggccgcgctggacaatgccggcaagatcatggcgctgaccaaatccgcgcccgactacctggtggggccctcgctgcccgcggacattacccagaaccgcatctaccgcatcctcgctctcaacggctacgaccctgcctacgccggctccgtctttctcggctgggctcagaaaaagttcgggaaacgcaacaccatctggctgtttggacccgccaccaccggcaagaccaacattgcggaagccatcgcccacgccgtgcccttctacggctgcgtcaactggaccaatgagaactttcccttcaatgattgcgtcgacaagatggtgatctggtgggaggagggcaagatgacggccaaggtcgtggagtccgccaaggccattctcggcggcagcaaggtgcgcgtggaccaaaagtgcaagtcgtccgcccagatcgaccccacccccgtgatcgtcacctccaacaccaacatgtgcgccgtgattgacgggaacagcaccaccttcgagcaccagcagcctctccaggaccggatgtttaagttcgaactcacccgccgtctggagcacgactttggcaaggtgacaaagcaggaagtcaaagagttcttccgctgggccagtgatcacgtgaccgaggtggcgcatgagttttacgtcagaaagggcggagccagcaaaagacccgcccccgatgacgcggataaaagcgagcccaagcgggcctgcccctcagtcgcggatccatcgacgtcagacgcggaaggagctccggtggactttgccgacaggtaccaaaacaaatgttctcgtcacgcgggcatgcttcagatgctgtttccctgcaaaacgtgcgagagaatgaatcagaatttcaacatttgcttcacacacggggtcagagactgctcagagtgtttccccggcgtgtcagaatctcaaccggtcgtcagaaagaggacgtatcggaaactctgtgcgattcatcatctgctggggcgggctcccgagattgcttgctcggcctgcgatctggtcaacgtggacctggatgactgtgtttctgagcaataaatgacttaaaccaggtatggctgccgatggttatcttccagattggctcgaggacaacctctctgagggcattcgcgagtggtgggcgctgaaacctggagccccgaagcccaaagccaaccagcaaaagcaggacgacggccggggtctggtgcttcctggctacaagtacctcggacccttcaacggactcgacaagggggagcccgtcaacgcggcggacgcagcggccctcgagcacgacaaggcctacgaccagcagctgcaggcgggtgacaatccgtacctgcggtataaccacgccgacgccgagtttcaggagcgtctgcaagaagatacgtcttttgggggcaacctcgggcgagcagtcttccaggccaagaagcgggttctcgaacctctcggtctggttgaggaaggcgctaagacggctcctggaaagaagagaccggtagagccatcaccccagcgttctccagactcctctacgggcatcggcaagaaaggccaacagcccgccagaaaaagactcaattttggtcagactggcgactcagagtcagttccagaccctcaacctctcggagaacctccagcagcgccctctggtgtgggacctaatacaatggctgcaggcggtggcgcaccaatggcagacaataacgaaggcgccgacggagtgggtagttcctcgggaaattggcattgcgattccacatggctgggcgacagagtcatcaccaccagcacccgaacctgggccctgcccacctacaacaaccacctctacaagcaaatctccaacgggacatcgggaggagccaccaacgacaacacctacttcggctacagcaccccctgggggtattttgactttaacagattccactgccacttttcaccacgtgactggcagcgactcatcaacaacaactggggattccggcccaagagactcagcttcaagctcttcaacatccaggtcaaggaggtcacgcagaatgaaggcaccaagaccatcgccaataacctcaccagcaccatccaggtgtttacggactcggagtaccagctgccgtacgttctcggctctgcccaccagggctgcctgcctccgttcccggcggacgtgttcatgattccccagtacggctacctaacactcaacaacggtagtcaggccgtgggacgctcctccttctactgcctggaatactttccttcgcagatgctgagaaccggcaacaacttccagtttacttacaccttcgaggacgtgcctttccacagcagctacgcccacagccagagcttggaccggctgatgaatcctctgattgaccagtacctgtactacttgtctcggactcaaacaacaggaggcacggcaaatacgcagactctgggcttcagccaaggtgggcctaatacaatggccaatcaggcaaagaactggctgccaggaccctgttaccgccaacaacgcgtctcaacgacaaccgggcaaaacaacaatagcaactttgcctggactgctgggaccaaataccatctgaatggaagaaattcattggctaatcctggcatcgctatggcaacacacaaagacgacgaggagcgtttttttcccagtaacgggatcctgatttttggcaaacaaaatgctgccagagacaatgcggattacagcgatgtcatgctcaccagcgaggaagaaatcaaaaccactaaccctgtggctacagaggaatacggtatcgtggcagataacttgcagcagcaaaacacggctcctcaaattggaactgtcaacagccagggggccttacccggtatggtctggcagaaccgggacgtgtacctgcagggtcccatctgggccaagattcctcacacggacggcaacttccacccgtctccgctgatgggcggctttggcctgaaacatcctccgcctcagatcctgatcaagaacacgcctgtacctgcggatcctccgaccaccttcaaccagtcaaagctgaactctttcatcacgcaatacagcaccggacaggtcagcgtggaaattgaatgggagctgcagaaggaaaacagcaagcgctggaaccccgagatccagtacacctccaactactacaaatctacaagtgtggactttgctgttaatacagaaggcgtgtactctgaaccccgccccattggcacccgttacctcacccgtaatctgtaattgcctgttaatcaataaaccggttgattcgtttcagttgaactttggtctctgcg

SEQ ID NO: 11 - DNA, 4385 bp, Adeno-associated virus
cagagagggagtggccaactccatcactaggggtaatcgcgaagcgcctcccacgctgccgcgtcagcgctgacgtagattacgtcataggggagtggtcctgtattagctgtcacgtgagtgcttttgcgacattttgcgacaccacatggccatttgaggtatatatggccgagtgagcgagcaggatctccattttgaccgcgaaatttgaacgagcagcagccatgccgggcttctacgagattgtgatcaaggtgccgagcgacctggacgagcacctgccgggcatttctgactcttttgtgaactgggtggccgagaaggaatgggagctgcccccggattctgacatggatcggaatctgatcgagcaggcacccctgaccgtggccgagaagctgcagcgcgacttcctggtccaatggcgccgcgtgagtaaggccccggaggccctcttctttgttcagttcgagaagggcgagagctactttcacctgcacgttctggtcgagaccacgggggtcaagtccatggtgctaggccgcttcctgagtcagattcgggagaagctggtccagaccatctaccgcgggatcgagccgaccctgcccaactggttcgcggtgaccaagacgcgtaatggcgccggcggggggaacaaggtggtggacgagtgctacatccccaactacctcctgcccaagactcagcccgagctgcagtgggcgtggactaacatggaggagtatataagcgcgtgcttgaacctggccgagcgcaaacggctcgtggcgcagcacctgacccacgtcagccagacgcaggagcagaacaaggagaatctgaaccccaattctgacgcgcccgtgatcaggtcaaaaacctccgcgcgctacatggagctggtcgggtggctggtggaccggggcatcacctccgagaagcagtggatccaggaggaccaggcctcgtacatctccttcaacgccgcctccaactcgcggtcccagatcaaggccgcgctggacaatgccggcaagatcatggcgctgaccaaatccgcgcccgactacctggtaggcccttcacttccggtggacattacgcagaaccgcatctaccgcatcctgcagctcaacggctacgaccctgcctacgccggctccgtctttctcggctgggcacaaaagaagttcgggaaacgcaacaccatctggctgtttgggccggccaccacgggaaagaccaacatcgcagaagccattgcccacgccgtgcccttctacggctgcgtcaactggaccaatgagaactttcccttcaacgattgcgtcgacaagatggtgatctggtgggaggagggcaagatgacggccaaggtcgtggagtccgccaaggccattctcggcggcagcaaggtgcgcgtggaccaaaagtgcaagtcgtccgcccagatcgaccccactcccgtgatcgtcacctccaacaccaacatgtgcgccgtgattgacgggaacagcaccaccttcgagcaccagcagcctctccaggaccggatgtttaagttcgaactcacccgccgtctggagcacgactttggcaaggtgacaaagcaggaagtcaaagagttcttccgctgggccagtgatcacgtgaccgaggtggcgcatgagttttacgtcagaaagggcggagccagcaaaagacccgcccccgatgacgcggataaaagcgagcccaagcgggcctgcccctcagtcgcggatccatcgacgtcagacgcggaaggagctccggtggactttgccgacaggtaccaaaacaaatgttctcgtcacgcgggcatgcttcagatgctgcttccctgcaaaacgtgcgagagaatgaatcagaatttcaacatttgcttcacacacggggtcagagactgctcagagtgtttccccggcgtgtcagaatctcaaccggtcgtcagaaagaggacgtatcggaaactctgtgcgattcatcatctgctggggcgggctcccgagattgcttgctcggcctgcgatctggtcaacgtggacctggatgactgtgtttctgagcaataaatgacttaaaccaggtatggctgccgatggttatcttccagattggctcgaggacaacctctctgagggcattcgcgagtggtgggcgctgaaacctggagccccgaagcccaaagccaaccagcaaaagcaggacgacggccggggtctggtgcttcctggctacaagtacctcggacccttcaacggactcgacaagggggagcccgtcaacgcggcggacgcagcggccctcgagcacggcaaggcctacgaccagcagctgcaggcgggtgacaatccgtacctgcggtataaccacgccgacgccgagtttcaggagcgtctgcaagaagatacgtcttttgggggcaacctcgggcgagcagtcttccaggccaagaagcgggttctcgaacctctcggtctggttgaggaaggcgctaagacggctcctggaaagaagagaccggtagagccatcaccccagcgttctccagactcctctacgggcatcggcaagaaaggccaacagcccgccagaaaaagactcaattttggtcagactggcgactcagagtcagttccagaccctcaacctctcggagaacctccagcagcgccctctggtgtgggacctaatacaatggctgcaggcggtggcgcaccaatggcagacaataacgaaggcgccgacggagtgggtaattcctcgggaaattggcattgcgattccacatggctgggggacagagtcatcaccaccagcacccgaacctgggcattgcccacctacaacaaccacctctacaagcaaatctccaatggaacatcgggaggaagcaccaacgacaacacctactttggctacagcaccccctgggggtattttgacttcaacagattccactgccacttctcaccacgtgactggcagcgactcatcaacaacaactggggattccggccaaagagactcaacttcaagctgttcaacatccaggtcaaggaggttacgacgaacgaaggcaccaagaccatcgccaataaccttaccagcaccgtccaggtctttacggactcggagtaccagctaccgtacgtcctaggctctgcccaccaaggatgcctgccaccgtttcctgcagacgtcttcatggttcctcagtacggctacctgacgctcaacaatggaagtcaagcgttaggacgttcttctttctactgtctggaatacttcccttctcagatgctgagaaccggcaacaactttcagttcagctacactttcgaggacgtgcctttccacagcagctacgcacacagccagagtctagatcgactgatgaaccccctcatcgaccagtacctatactacctggtcagaacacagacaactggaactgggggaactcaaactttggcattcagccaagcaggccctagctcaatggccaatcaggctagaaactgggtacccgggccttgctaccgtcagcagcgcgtctccacaaccaccaaccaaaataacaacagcaactttgcgtggacgggagctgctaaattcaagctgaacgggagagactcgctaatgaatcctggcgtggctatggcatcgcacaaagacgacgaggaccgcttctttccatcaagtggcgttctcatatttggcaagcaaggagccgggaacgatggagtcgactacagccaggtgctgattacagatgaggaagaaattaaagccaccaaccctgtagccacagaggaatacggagcagtggccatcaacaaccaggccgctaacacgcaggcgcaaactggacttgtgcataaccagggagttattcctggtatggtctggcagaaccgggacgtgtacctgcagggccctatttgggctaaaatacctcacacagatggcaactttcacccgtctcctctgatgggtggatttggactgaaacacccacctccacagattctaattaaaaatacaccagtgccggcagatcctcctcttaccttcaatcaagccaagctgaactctttcatcacgcagtacagcacgggacaagtcagcgtggaaatcgagtgggagctgcagaaagaaaacagcaagcgctggaatccagagatccagtatacttcaaactactacaaatctacaaatgtggactttgctgtcaataccaaaggtgtttactctgagcctcgccccattggtactcgttacctcacccgtaatttgtaattgcctgttaatcaataaaccggttaattcgtttcagttgaactttggtctctgcg

SEQ ID NO: 12 - DNA, 4102 bp, Adeno-associated virus
atgccgggcttctacgagatcgtgatcaaggtgccgagcgacctggacgagcacctgccgggcatttctgactcgtttgtgaactgggtggccgagaaggaatgggagctgcccccggattctgacatggatcggaatctgatcgagcaggcacccctgaccgtggccgagaagctgcagcgcgacttcctggtccactggcgccgcgtgagtaaggccccggaggccctcttctttgttcagttcgagaagggcgagtcctactttcacctgcacgttctggtcgagaccacgggggtcaagtccatggtcctgggccgcttcctgagtcagatcagagacaggctggtgcagaccatctaccgcggggtagagcccacgctgcccaactggttcgcggtgaccaagacgcgaaatggcgccggcggggggaacaaggtggtggacgagtgctacatccccaactacctcctgcccaagacgcagcccgagctgcagtgggcgtggactaacatggaggagtatataagcgcgtgtctgaacctcgcggagcgtaaacggctcgtggcgcagcacctgacccacgtcagccagacgcaggagcagaacaaggagaatctgaacccgaattctgacgcgcccgtgatcaggtcaaaaacctccgcgcgctacatggagctggtcgggtggctggtggaccggggcatcacctccgagaagcagtggatccaggaggaccaggcctcgtacatctccttcaacgccgcctccaactcgcggtcccagatcaaggccgcgctggacaatgccggaaagatcatggcgctgaccaaatccgcgcccgactacctggtaggcccgtccttacccgcggacattaaggccaaccgcatctaccgcatcctggagctcaacggctacgaccccgcctacgccggctccgtcttcctgggctgggcgcagaaaaagttcggtaaaaggaatacaatttggctgttcgggcccgccaccaccggcaagaccaacatcgcggaagccatcgcccacgccgtgcccttctacggctgcgtcaactggaccaatgagaactttcccttcaacgattgcgtcgacaagatggtgatctggtgggaggagggcaagatgaccgccaaggtcgtggagtccgccaaggccattctgggcggaagcaaggtgcgcgtcgaccaaaagtgcaagtcctcggcccagatcgaccccacgcccgtgatcgtcacctccaacaccaacatgtgcgccgtgatcgacgggaacagcaccaccttcgagcaccagcagcccctgcaggaccgcatgttcaagttcgagctcacccgccgtctggagcacgactttggcaaggtgaccaagcaggaagtcaaagagttcttccgctgggctcaggatcacgtgactgaggtgacgcatgagttctacgtcagaaagggcggagccaccaaaagacccgcccccagtgacgcggatataagcgagcccaagcgggcctgcccctcagttgcggagccatcgacgtcagacgcggaagcaccggtggactttgcggacaggtaccaaaacaaatgttctcgtcacgcgggcatgcttcagatgctgtttccctgcaagacatgcgagagaatgaatcagaatttcaacgtctgcttcacgcacggggtcagagactgctcagagtgcttccccggcgcgtcagaatctcaacctgtcgtcagaaaaaagacgtatcagaaactgtgcgcgattcatcatctgctggggcgggcacccgagattgcgtgttcggcctgcgatctcgtcaacgtggacttggatgactgtgtttctgagcaataaatgacttaaaccaggtatggctgctgacggttatcttccagattggctcgaggacaacctctctgagggcattcgcgagtggtgggacctgaaacctggagcccccaagcccaaggccaaccagcagaagcaggacgacggccggggtctggtgcttcctggctacaagtacctcggacccttcaacggactcgacaagggggagcccgtcaacgcggcggacgcagcggccctcgagcacgacaaggcctacgaccagcagctcaaagcgggtgacaatccgtacctgcggtataaccacgccgacgccgagtttcaggagcgtctgcaagaagatacgtcttttgggggcaacctcgggcgagcagtcttccaggccaagaagcgggttctcgaacctctcggtctggttgaggaagctgctaagacggctcctggaaagaagagaccggtagaaccgtcacctcagcgttcccccgactcctccacgggcatcggcaagaaaggccagcagcccgctaaaaagagactgaactttgggcagactggcgagtcagagtcagtccccgaccctcaaccaatcggagaaccaccagcaggcccctctggtctgggatctggtacaatggctgcaggcggtggcgctccaatggcagacaataacgaaggcgccgacggagtgggtagttcctcaggaaattggcattgcgattccacatggctgggcgacagagtcatcaccaccagcacccgaacctgggccctgcccacctacaacaaccacctctacaagcaaatctccaacgggacatcgggaggaagcaccaacgacaacacctacttcggctacagcaccccctgggggtattttgacttcaacagattccactgccacttctcaccacgtgactggcagcgactcatcaacaacaactggggattccggccaaaaagactcagcttcaagctcttcaacatccaggtcaaggaggtcacgcagaatgaaggcaccaagaccatcgccaataaccttaccagcacgattcaggtatttacggactcggaataccagctgccgtacgtcctcggctccgcgcaccagggctgcctgcctccgttcccggcggatgtcttcatgattccccagtacggctacctgacactgaacaatggaagtcaagccgtaggccgttcctccttctactgcctggaatattttccatctcaaatgctgcgaactggaaacaattttgaattcagctacaccttcgaggacgtgcctttccacagcagctacgcacacagccagagcttggaccgactgatgaatcctctcattgaccagtacctgtactacttatccagaactcagtccacaggaggaactcaaggtacccagcaattgttattttctcaagctgggcctgcaaacatgtcggctcaggccaagaactggctgcctggaccttgctaccggcagcagcgagtctccacgacactgtcgcaaaacaacaacagcaactttgcttggactggtgccaccaaatatcacctgaacggaagagactctctggtgaatcccggtgtcgccatggcaacccacaaggacgacgaggaacgcttcttcccgtcgagcggagtcctgatgtttggaaaacagggtgctggaagagacaatgtggactacagcagcgttatgctaacaagcgaagaagaaattaaaaccactaaccctgtagccacagaacaatacggcgtggtggctgacaacttgcagcaagccaatacagggcctattgtgggaaatgtcaacagccaaggagccttacctggcatggtctggcagaaccgagacgtgtacctgcagggtcccatctgggccaagattcctcacacggacggcaactttcacccgtctcctctgatgggcggctttggacttaaacacccgcctccacagatcctgatcaagaacacgccggtacctgcggatcctccaacaacgttcagccaggcgaaattggcttccttcatcacgcagtacagcaccggacaggtcagcgtggaaatcgagtgggagctgcagaaggagaacagcaaacgctggaacccagagattcagtacacttcaaactactacaaatctacaaatgtggactttgctgtcaatacagagggaacttattctgagcctcgccccattggtactcgttatctgacacgtaatctgtaa

SEQ ID NO: 13 - DNA, 4087 bp, Adeno-associated virus
atgccgggcttctacgagatcgtgatcaaggtgccgagcgacctggacgagcacctgccgggcatttctgactcgtttgtgaactgggtggccgagaaggaatgggagctgcccccggattctgacatggatcggaatctgatcgagcaggcacccctgaccgtggccgagaagctgcagcgcgacttcctggtccactggcgccgcgtgagtaaggccccggaggccctcttctttgttcagttcgagaagggcgagtcctacttccacctccacgttctcgtcgagaccacgggggtcaagtccatggtcctgggccgcttcctgagtcagatcagagacaggctggtgcagaccatctaccgcggggtcgagcccacgctgcccaactggttcgcggtgaccaagacgcgaaatggcgccggcggggggaacaaggtggtggacgagtgctacatccccaactacctcctgcccaagacccagcccgagctgcagtgggcgtggactaacatggaggagtatataagcgcgtgtctaaacctcgcggagcgtaaacggctcgtggcgcagcacctgacccacgtcagccagacgcaggagcagaacaaggagaatctgaacccgaattctgacgcgcccgtgatcaggtcaaaaacctccgcgcgctacatggagctggtcgggtggctggtggaccggggcatcacctccgagaagcagtggatccaggaggaccaggcctcgtacatctccttcaacgccgcctccaactcgcggtcccagatcaaggccgcgctggacaatgccggaaagatcatggcgctgaccaaatccgcgcccgactacctggtaggcccgtccttacccgcggacattaaggccaaccgcatctaccgcatcctggagctcaacggctacgaccccgcctacgccggctccgtcttcctgggctgggcgcagaaaaagttcggtaaacgcaacaccatctggctgtttgggcccgccaccaccggcaagaccaacatcgcggaagccatagcccacgccgtgcccttctacggctgcgtgaactggaccaatgagaactttcccttcaacgattgcgtcgacaagatggtgatctggtgggaggagggcaagatgaccgccaaggtcgtggagtccgccaaggccattctgggcggaagcaaggtgcgcgtggaccaaaagtgcaagtcctcggcccagatcgaccccacgcccgtgatcgtcacctccaacaccaacatgtgcgccgtgatcgacgggaacagcaccaccttcgagcaccagcagccgctgcaggaccgcatgttcaagttcgagctcacccgccgtctggagcacgactttggcaaggtgaccaagcaggaagtcaaagagttcttccgctgggctcaggatcacgtgactgaggtggcgcatgagttctacgtcagaaagggcggagccaccaaaagacccgcccccagtgacgcggatataagcgagcccaagcgggcctgcccctcagttccggagccatcgacgtcagacgcggaagcaccggtggactttgcggacaggtaccaaaacaaatgttctcgtcacgcgggcatgcttcagatgctgtttccctgcaagacatgcgagagaatgaatcagaatttcaacgtctgcttcacgcacggggtcagagactgctcagagtgcttccccggcgcgtcagaatctcaacccgtcgtcagaaaaaagacgtatcagaaactgtgcgcgattcatcatctgctggggcgggcacccgagattgcgtgttcggcctgcgatctcgtcaacgtggacttggatgactgtgtttctgagcaataaatgacttaaaccaggtatggctgctgacggttatcttccagattggctcgaggacaacctctctgagggcattcgcgagtggtgggacctgaaacctggagccccgaagcccaaggccaaccagcagaagcaggacgacggccggggtctggtgcttcctggctacaagtacctcggacccttcaacggactcgacaagggggagcccgtcaacgcggcggacgcagcggccctcgagcacgacaaggcctacgaccagcagctcaaagcgggtgacaatccgtacctgcggtataaccacgccgacgccgagtttcaggagcgtctgcaagaagatacgtcttttgggggcaacctcgggcgagcagtcttccaggccaagaagagggtactcgaacctctgggcctggttgaagaaggtgctaaaacggctcctggaaagaagagaccgttagagtcaccacaagagcccgactcctcctcgggcatcggcaaaaaaggcaaacaaccagccagaaagaggctcaactttgaagaggacactggagccggagacggaccccctgaaggatcagataccagcgccatgtcttcagacattgaaatgcgtgcagcaccgggcggaaatgctgtcgatgcgggacaaggttccgatggagtgggtaatgcctcgggtgattggcattgcgattccacctggtctgagggcaaggtcacaacaacctcgaccagaacctgggtcttgcccacctacaacaaccacttgtacctgcgtctcggaacaacatcaagcagcaacacctacaacggattctccaccccctggggatattttgacttcaacagattccactgtcacttctcaccacgtgactggcaaagactcatcaacaacaactggggactacgaccaaaagccatgcgcgttaaaatcttcaatatccaagttaaggaggtcacaacgtcgaacggcgagactacggtcgctaataaccttaccagcacggttcagatatttgcggactcgtcgtatgagctcccgtacgtgatggacgctggacaagaggggagcctgcctcctttccccaatgacgtgttcatggtgcctcaatatggctactgtggcatcgtgactggcgagaatcagaaccaaacggacagaaacgctttctactgcctggagtattttccttcgcaaatgttgagaactggcaacaactttgaaatggcttacaactttgagaaggtgccgttccactcaatgtatgctcacagccagagcctggacagactgatgaatcccctcctggaccagtacctgtggcacttacagtcgactacctctggagagactctgaatcaaggcaatgcagcaaccacatttggaaaaatcaggagtggagactttgccttttacagaaagaactggctgcctgggccttgtgttaaacagcagagattctcaaaaactgccagtcaaaattacaagattcctgccagcgggggcaacgctctgttaaagtatgacacccactataccttaaacaaccgctggagcaacatcgcgcccggacctccaatggccacagccggaccttcggatggggacttcagtaacgcccagcttatattccctggaccatctgttaccggaaatacaacaacttcagccaacaatctgttgtttacatcagaagaagaaattgctgccaccaacccaagagacacggacatgtttggccagattgctgacaataatcagaatgctacaactgctcccataaccggcaacgtgactgctatgggagtgctgcctggcatggtgtggcaaaacagagacatttactaccaagggccaatttgggccaagatcccacacgcggacggacattttcatccttcaccgctgattggtgggtttggactgaaacacccgcctccccagatattcatcaagaacactcccgtacctgccaatcctgcgacaaccttcactgcagccagagtggactctttcatcacacaatacagcaccggccaggtcgctgttcagattgaatgggaaattgaaaaggaacgctccaaacgctggaatcctgaagtgcagtttacttcaaactatgggaaccagtcttctatgttgtgggctcctgatacaactgggaagtatacagagccgcgggttattggctctcgttatttgactaatcatttgtaa

SEQ ID NO: 14 - DNA, 4213 bp, Adeno-associated virus
ttgcgacagtttgcgacaccatgtggtcacaagaggtatataaccgcgagtgagccagcgaggagctccattttgcccgcgaagtttgaacgagcagcagccatgccggggttctacgaggtggtgatcaaggtgcccagcgacctggacgagcacctgcccggcatttctgactcctttgtgaactgggtggccgagaaggaatgggagttgcccccggattctgacatggatcagaatctgattgagcaggcacccctgaccgtggccgagaagctgcagcgcgagttcctggtggaatggcgccgagtgagtaaatttctggaggccaagttttttgtgcagtttgaaaagggggactcgtactttcatttgcatattctgattgaaattaccggcgtgaaatccatggtggtgggccgctacgtgagtcagattagggataaactgatccagcgcatctaccgcggggtcgagccccagctgcccaactggttcgcggtcacaaagacccgaaatggcgccggaggcgggaacaaggtggtggacgagtgctacatccccaactacctgctccccaaggtccagcccgagcttcagtgggcgtggactaacatggaggagtatataagcgcctgtttgaacctcgcggagcgtaaacggctcgtggcgcagcacctgacgcacgtctcccagacccaggagggcgacaaggagaatctgaacccgaattctgacgcgccggtgatccggtcaaaaacctccgccaggtacatggagctggtcgggtggctggtggacaagggcatcacgtccgagaagcagtggatccaggaggaccaggcctcgtacatctccttcaacgcggcctccaactcccggtcgcagatcaaggcggccctggacaatgcctccaaaatcatgagcctcaccaaaacggctccggactatctcatcgggcagcagcccgtgggggacattaccaccaaccggatctacaaaatcctggaactgaacgggtacgacccccagtacgccgcctccgtctttctcggctgggcccagaaaaagtttggaaagcgcaacaccatctggctgtttgggcccgccaccaccggcaagaccaacatcgcggaagccatcgcccacgcggtccccttctacggctgcgtcaactggaccaatgagaactttcccttcaacgactgcgtcgacaaaatggtgatttggtgggaggagggcaagatgaccgccaaggtcgtagagtccgccaaggccattctgggcggcagcaaggtgcgcgtggaccaaaaatgcaaggcctctgcgcagatcgaccccacccccgtgatcgtcacctccaacaccaacatgtgcgccgtgattgacgggaacagcaccaccttcgagcaccagcagcccctgcaggaccggatgttcaagtttgaactcacccgccgcctcgaccacgactttggcaaggtcaccaagcaggaagtcaaggactttttccggtgggcggctgatcacgtgactgacgtggctcatgagttttacgtcacaaagggtggagctaagaaaaggcccgccccctctgacgaggatataagcgagcccaagcggccgcgcgtgtcatttgcgcagccggagacgtcagacgcggaagctcccggagacttcgccgacaggtaccaaaacaaatgttctcgtcacgcgggtatgctgcagatgctctttccctgcaagacgtgcgagagaatgaatcagaattccaacgtctgcttcacgcacggtcagaaagattgcggggagtgctttcccgggtcagaatctcaaccggtttctgtcgtcagaaaaacgtatcagaaactgtgcatccttcatcagctccggggggcacccgagatcgcctgctctgcttgcgaccaactcaaccccgatttggacgattgccaatttgagcaataaatgactgaaatcaggtatggctgctgacggttatcttccagattggctcgaggacaacctctctgaaggcattcgcgagtggtgggcgctgaaacctggagctccacaacccaaggccaaccaacagcatcaggacaacggcaggggtcttgtgcttcctgggtacaagtacctcggacccttcaacggactcgacaagggagagccggtcaacgaggcagacgccgcggccctcgagcacgacaaggcctacgacaagcagctcgagcagggggacaacccgtatctcaagtacaaccacgccgacgccgagttccagcagcgcttggcgaccgacacctcttttgggggcaacctcgggcgagcagtcttccaggccaaaaagaggattctcgagcctctgggtctggttgaagagggcgttaaaacggctcctggaaagaaacgcccattagaaaagactccaaatcggccgaccaacccggactctgggaaggccccggccaagaaaaagcaaaaagacggcgaaccagccgactctgctagaaggacactcgactttgaagactctggagcaggagacggaccccctgagggatcatcttccggagaaatgtctcatgatgctgagatgcgtgcggcgccaggcggaaatgctgtcgaggcgggacaaggtgccgatggagtgggtaatgcctccggtgattggcattgcgattccacctggtcagagggccgagtcaccaccaccagcacccgaacctgggtcctacccacgtacaacaaccacctgtacctgcgaatcggaacaacggccaacagcaacacctacaacggattctccaccccctggggatactttgactttaaccgcttccactgccacttttccccacgcgactggcagcgactcatcaacaacaactggggactcaggccgaaatcgatgcgtgttaaaatcttcaacatacaggtcaaggaggtcacgacgtcaaacggcgagactacggtcgctaataaccttaccagcacggttcagatctttgcggattcgacgtatgaactcccatacgtgatggacgccggtcaggaggggagctttcctccgtttcccaacgacgtctttatggttccccaatacggatactgcggagttgtcactggaaaaaaccagaaccagacagacagaaatgccttttactgcctggaatactttccatcccaaatgctaagaactggcaacaattttgaagtcagttaccaatttgaaaaagttcctttccattcaatgtacgcgcacagccagagcctggacagaatgatgaatcctttactggatcagtacctgtggcatctgcaatcgaccactaccggaaattcccttaatcaaggaacagctaccaccacgtacgggaaaattaccactggagactttgcctactacaggaaaaactggttgcctggagcctgcattaaacaacaaaaattttcaaagaatgccaatcaaaactacaagattcccgccagcgggggagacgcccttttaaagtatgacacgcataccactctaaatgggcgatggagtaacatggctcctggacctccaatggcaaccgcaggtgccggggactcggattttagcaacagccagctgatctttgccggacccaatccgagcggtaacacgaccacatcttcaaacaatttgttgtttacctcagaagaggagattgccacaacaaacccacgagacacggacatgtttggacagattgcagataataatcaaaatgccaccaccgcccctcacatcgctaacctggacgctatgggaattgttcccggaatggtctggcaaaacagagacatctactaccagggccctatttgggccaaggtccctcacacggacggacactttcacccttcgccgctgatgggaggatttggactgaaacacccgcctccacagattttcatcaaaaacacccccgtacccgccaatcccaatactacctttagcgctgcaaggattaattcttttctgacgcagtacagcaccggacaagttgccgttcagatcgactgggaaattcagaaggagcattccaaacgctggaatcccgaagttcaatttacttcaaactacggcactcaaaattctatgctgtgggctcccgacaatgctggcaactaccacgaactccgggctattgggtcccgtttcctcacccaccacttgtaa

SEQ ID NO: 15 - DNA, 4180 bp, Adeno-associated virus
ccgcgagtgagcgaaccaggagctccattttgcccgcgaattttgaacgagcagcagccatgccgggattctacgagattgtcctgaaggtgcccagcgacctggacgagcacctgcctggcatttctgactcttttgtaaactgggtggcggagaaggaatgggagctgccgccggattctgacatggatctgaatctgattgagcaggcacccctaaccgtggccgaaaagctgcaacgcgaattcctggtcgagtggcgccgcgtgagtaaggccccggaggccctcttctttgttcagttcgagaagggggacagctacttccacctacacattctggtggagaccgtgggcgtgaaatccatggtggtgggccgctacgtgagccagattaaagagaagctggtgacccgcatctaccgcggggtcgagccgcagcttccgaactggttcgcggtgaccaagacgcgtaatggcgccggaggcgggaacaaggtggtggacgactgctacatccccaactacctgctccccaagacccagcccgagctccagtgggcgtggactaatatggaccagtatttaagcgcctgtttgaatctcgcggagcgtaaacggctggtggcgcagcatctgacgcacgtgtcgcagacgcaggagcagaacaaagagaaccagaatcccaattctgacgcgccggtgatcagatcaaaaacctccgcgaggtacatggagctggtcgggtggctggtggaccgcgggatcacgtcagaaaagcaatggatccaggaggaccaggcctcttacatctccttcaacgccgcctccaactcgcggtcacaaatcaaggccgcactggacaatgcctccaaatttatgagcctgacaaaaacggctccggactacctggtgggaaacaacccgccggaggacattaccagcaaccggatctacaaaatcctcgagatgaacgggtacgatccgcagtacgcggcctccgtcttcctgggctgggcgcaaaagaagttcgggaagaggaacaccatctggctctttgggccggccacgacgggtaaaaccaacatcgctgaagctatcgcccacgccgtgcccttttacggctgcgtgaactggaccaatgagaactttccgttcaacgattgcgtcgacaagatggtgatctggtgggaggagggcaagatgacggccaaggtcgtggagtccgccaaggccattctgggcggaagcaaggtgcgcgtggaccaaaagtgcaagtcatcggcccagatcgacccaactcccgtcatcgtcacctccaacaccaacatgtgcgcggtcatcgacggaaattccaccaccttcgagcaccaacaaccactccaagaccggatgttcaagttcgagctcaccaagcgcctggagcacgactttggcaaggtcaccaagcaggaagtcaaggactttttccggtgggcgtcagatcacgtgactgaggtgtctcacgagttttacgtcagaaagggtggagctagaaagaggcccgcccccaatgacgcagatataagtgagcccaagcgggcctgtccgtcagttgcgcagccatcgacgtcagacgcggaagctccggtggactacgcggacaggtaccaaaacaaatgttctcgtcacgtgggcatgaatctgatgctttttccctgccggcaatgcgagagaatgaatcagaatgtggacatttgcttcacgcacggggtcatggactgtgccgagtgcttccccgtgtcagaatctcaacccgtgtctgtcgtcagaaagcggacatatcagaaactgtgtccgattcatcacatcatggggagggcgcccgaggtggcttgttcggcctgcgatctggccaatgtggacttggatgactgtgacatggagcaataaatgactcaaaccagatatgactgacggttaccttccagattggctagaggacaacctctctgaaggcgttcgagagtggtgggcgctgcaacctggagcccctaaacccaaggcaaatcaacaacatcaggacaacgctcggggtcttgtgcttccgggttacaaatacctcggacccggcaacggacttgacaagggggaacccgtcaacgcagcggacgcggcagccctcgaacacgacaaggcctacgaccagcagctcaaggccggtgacaacccctacctcaagtacaaccacgccgacgccgagtttcaggagcgtcttcaagaagatacgtcttttgggggcaacctcggacgagcagtcttccaggccaaaaagaggatccttgagcctctgggtctggttgaggaagcggctaagacggctcctggaaaaaagagacctgtagagcaatctccagcagaaccggactcctcttcgggcatcggcaaatcaggccagcagcccgctagaaaaagactgaattttggtcagactggcgacacagagtcagtcccagaccctcaaccactcggacaacctcccgcagccccctctggtgtgggatctactacaatggcttcaggcggtggcgcaccaatggcagacaataacgagggtgccgatggagtgggtaattcctcaggaaattggcattgcgattcccaatggctgggcgacagagtcatcaccaccagcacccgcacctgggccctgcccacctacaacaatcacctctacaagcaaatctccagccaatcaggagccaccaacgacaaccactactttggctacagcaccccctgggggtattttgacttcaacagattccactgccacttttcaccacgtgactggcaaagactcatcaacaacaactggggattccgacccaagagactcaacttcaagctctttaacattcaagtcaaagaggtcacgcagaatgacggtacgacgacgattgccaataaccttaccagcacggttcaggtgtttactgactccgagtaccagctcccgtacgtcctcggctcggcgcatcagggatgcctcccgccgttcccagcagacgtcttcatggtcccacagtatggatacctcaccctgaacaacgggagtcaggcggtaggacgctcttccttttactgcctggagtactttccttctcagatgctgcgtactggaaacaactttcagtttagctacacttttgaagacgtgcctttccacagcagctacgctcacagccaaagtctggaccgtctcatgaatcctctgatcgaccagtacctgtactatctgaacaggacacaaacagccagtggaactcagcagtctcggctactgtttagccaagctggacccaccagtatgtctcttcaagctaaaaactggctgcctggaccttgctacagacagcagcgtctgtcaaagcaggcaaacgacaacaacaacagcaactttccctggactggtgccaccaaatatcatctgaatggccgggactcattggtgaacccgggccctgctatggccagtcacaaggatgacaaagaaaagtttttccccatgcatggaaccctgatatttggtaaagaaggaacaaatgccaacaacgcggatttggaaaatgtcatgattacagatgaagaagaaatccgcaccaccaatcccgtggctacggagcagtacgggactgtgtcaaataatttgcaaaactcaaacgctggtccaactactggaactgtcaatcaccaaggagcgttacctggtatggtgtggcaggatcgagacgtgtacctgcagggacccatttgggccaagattcctcacaccgatggacactttcatccttctccactgatgggaggttttgggctcaaacacccgcctcctcagatcatgatcaaaaacactcccgttccagccaatcctcccacaaactttagtgcggcaaagtttgcttccttcatcacacagtactccacggggcaggtcagcgtggagatcgagtgggagctgcagaaggagaacagcaaacgctggaatcccgaaattcagtacacttccaactacaacaaatctgttaatgtggactttactgtggacactaatggtgtgtattcagagcctcgccccattggcaccagatacctgactcgtaatctgtaattgcttgttaatcaataaaccggttaattcg

SEQ ID NO: 16 - DNA, 4679 bp, Adeno-associated virus
ttggccactccctctctgcgcgctcgctcgctcactgaggccgggcgaccaaaggtcgcccgacgcccgggctttgcccgggcggcctcagtgagcgagcgagcgcgcagagagggagtggccaactccatcactaggggttcctggaggggtggagtcgtgacgtgaattacgtcatagggttagggaggtcctgtattagaggtcacgtgagtgttttgcgacattttgcgacaccatgtggtcacgctgggtatttaagcccgagtgagcacgcagggtctccattttgaagcgggaggtttgaacgcgcagccgccatgccggggttttacgagattgtgattaaggtccccagcgaccttgacgagcatctgcccggcatttctgacagctttgtgaactgggtggccgagaaggaatgggagttgccgccagattctgacatggatctgaatctgattgagcaggcacccctgaccgtggccgagaagctgcagcgcgactttctgacggaatggcgccgtgtgagtaaggccccggaggcccttttctttgtgcaatttgagaagggagagagctacttccacatgcacgtgctcgtggaaaccaccggggtgaaatccatggttttgggacgtttcctgagtcagattcgcgaaaaactgattcagagaatttaccgcgggatcgagccgactttgccaaactggttcgcggtcacaaagaccagaaatggcgccggaggcgggaacaaggtggtggatgagtgctacatccccaattacttgctccccaaaacccagcctgagctccagtgggcgtggactaatatggaacagtatttaagcgcctgtttgaatctcacggagcgtaaacggttggtggcgcagcatctgacgcacgtgtcgcagacgcaggagcagaacaaagagaatcagaatcccaattctgatgcgccggtgatcagatcaaaaacttcagccaggtacatggagctggtcgggtggctcgtggacaaggggattacctcggagaagcagtggatccaggaggaccaggcctcatacatctccttcaatgcggcctccaactcgcggtcccaaatcaaggctgccttggacaatgcgggaaagattatgagcctgactaaaaccgcccccgactacctggtgggccagcagcccgtggaggacatttccagcaatcggatttataaaattttggaactaaacgggtacgatccccaatatgcggcttccgtctttctgggatgggccacgaaaaagttcggcaagaggaacaccatctggctgtttgggcctgcaactaccgggaagaccaacatcgcggaggccatagcccacactgtgcccttctacgggtgcgtaaactggaccaatgagaactttcccttcaacgactgtgtcgacaagatggtgatctggtgggaggaggggaagatgaccgccaaggtcgtggagtcggccaaagccattctcggaggaagcaaggtgcgcgtggaccagaaatgcaagtcctcggcccagatagacccgactcccgtgatcgtcacctccaacaccaacatgtgcgccgtgattgacgggaactcaacgaccttcgaacaccagcagccgttgcaagaccggatgttcaaatttgaactcacccgccgtctggatcatgactttgggaaggtcaccaagcaggaagtcaaagactttttccggtgggcaaaggatcacgtggttgaggtggagcatgaattctacgtcaaaaagggtggagccaagaaaagacccgcccccagtgacgcagatataagtgagcccaaacgggtgcgcgagtcagttgcgcagccatcgacgtcagacgcggaagcttcgatcaactacgcagacaggtaccaaaacaaatgttctcgtcacgtgggcatgaatctgatgctgtttccctgcagacaatgcgagagaatgaatcagaattcaaatatctgcttcactcacggacagaaagactgtttagagtgctttcccgtgtcagaatctcaacccgtttctgtcgtcaaaaaggcgtatcagaaactgtgctacattcatcatatcatgggaaaggtgccagacgcttgcactgcctgcgatctggtcaatgtggatttggatgactgcatctttgaacaataaatgatttaaatcaggtatggctgccgatggttatcttccagattggctcgaggacactctctctgaaggaataagacagtggtggaagctcaaacctggcccaccaccaccaaagcccgcagagcggcataaggacgacagcaggggtcttgtgcttcctgggtacaagtacctcggacccttcaacggactcgacaagggagagccggtcaacgaggcagacgccgcggccctcgagcacgacaaagcctacgaccggcagctcgacagcggagacaacccgtacctcaagtacaaccacgccgacgcggagtttcaggagcgccttaaagaagatacgtcttttgggggcaacctcggacgagcagtcttccaggcgaaaaagagggttcttgaacctctgggcctggttgaggaacctgttaagacggctccgggaaaaaagaggccggtagagcactctcctgtggagccagactcctcctcgggaaccggaaaggcgggccagcagcctgcaagaaaaagattgaattttggtcagactggagacgcagactcagtacctgacccccagcctctcggacagccaccagcagccccctctggtctgggaactaatacgatggctacaggcagtggcgcaccaatggcagacaataacgagggcgccgacggagtgggtaattcctcgggaaattggcattgcgattccacatggatgggcgacagagtcatcaccaccagcacccgaacctgggccctgcccacctacaacaaccacctctacaaacaaatttccagccaatcaggagcctcgaacgacaatcactactttggctacagcaccccttgggggtattttgacttcaacagattccactgccacttttcaccacgtgactggcaaagactcatcaacaacaactggggattccgacccaagagactcaacttcaagctctttaacattcaagtcaaagaggtcacgcagaatgacggtacgacgacgattgccaataaccttaccagcacggttcaggtgtttactgactcggagtaccagctcccgtacgtcctcggctcggcgcatcaaggatgcctcccgccgttcccagcagacgtcttcatggtgccacagtatggatacctcaccctgaacaacgggagtcaggcagtaggacgctcttcattttactgcctggagtactttccttctcagatgctgcgtaccggaaacaactttaccttcagctacacttttgaggacgttcctttccacagcagctacgctcacagccagagtctggaccgtctcatgaatcctctcatcgaccagtacctgtattacttgagcagaacaaacactccaagtggaaccaccacgcagtcaaggcttcagttttctcaggccggagcgagtgacattcgggaccagtctaggaactggcttcctggaccctgttaccgccagcagcgagtatcaaagacatctgcggataacaacaacagtgaatactcgtggactggagctaccaagtaccacctcaatggcagagactctctggtgaatccgggcccggccatggcaagccacaaggacgatgaagaaaagttttttcctcagagcggggttctcatctttgggaagcaaggctcagagaaaacaaatgtggacattgaaaaggtcatgattacagacgaagaggaaatcaggacaaccaatcccgtggctacggagcagtatggttctgtatctaccaacctccagagaggcaacagacaagcagctaccgcagatgtcaacacacaaggcgttcttccaggcatggtctggcaggacagagatgtgtaccttcaggggcccatctgggcaaagattccacacacggacggacattttcacccctctcccctcatgggtggattcggacttaaacaccctcctccacagattctcatcaagaacaccccggtacctgcgaatccttcgaccaccttcagtgcggcaaagtttgcttccttcatcacacagtactccacgggacaggtcagcgtggagatcgagtgggagctgcagaaggaaaacagcaaacgctggaatcccgaaattcagtacacttccaactacaacaagtctgttaatgtggactttactgtggacactaatggcgtgtattcagagcctcgccccattggcaccagatacctgactcgtaatctgtaattgcttgttaatcaataaaccgtttaattcgtttcagttgaactttggtctctgcgtatttctttcttatctagtttccatggctacgtagataagtagcatggcgggttaatcattaactacaaggaacccctagtgatggagttggccactccctctctgcgcgctcgctcgctcactgaggccgggcgaccaaaggtcgcccgacgcccgggctttgcccgggcggcctcagtgagcgagcgagcgcgcagagagggagtggccaa

SEQ ID NO: 17 - DNA, 145 bp, Adeno-associated virus
ttggccactccctctctgcgcgctcgctcgctcactgaggccgggcgaccaaaggtcgcccgacgcccgggctttgcccgggcggcctcagtgagcgagcgagcgcgcagagagggagtggccaactccatcactaggggttcct

SEQ ID NO: 18 - protein, 536 aa, Adeno-associated virus
MPGFYEIVIKVPSDLDEHLPGISDSFVNWVAEKEWELPPDSDMDLNLIEQAPLTVAEKLQRDFLTEWRRVSKAPEALFFVQFEKGESYFHMHVLVETTGVKSMVLGRFLSQIREKLIQRIYRGIEPTLPNWFAVTKTRNGAGGGNKVVDECYIPNYLLPKTQPELQWAWTNMEQYLSACLNLTERKRLVAQHLTHVSQTQEQNKENQNPNSDAPVIRSKTSARYMELVGWLVDKGITSEKQWIQEDQASYISFNAASNSRSQIKAALDNAGKIMSLTKTAPDYLVGQQPVEDISSNRIYKILELNGYDPQYAASVFLGWATKKFGKRNTIWLFGPATTGKTNIAEAIAHTVPFYGCVNWTNENFPFNDCVDKMVIWWEEGKMTAKVVESAKAILGGSKVRVDQKCKSSAQIDPTPVIVTSNTNMCAVIDGNSTTFEHQQPLQDRMFKFELTRRLDHDFGKVTKQEVKDFFRWAKDHVVEVEHEFYVKKGGAKKRPAPSDADISEPKRVRESVAQPSTSDAEASINYADRLARGHSL

SEQ ID NO: 19 - protein, 621 aa, Adeno-associated virus
MPGFYEIVIKVPSDLDEHLPGISDSFVNWVAEKEWELPPDSDMDLNLIEQAPLTVAEKLQRDFLTEWRRVSKAPEALFFVQFEKGESYFHMHVLVETTGVKSMVLGRFLSQIREKLIQRIYRGIEPTLPNWFAVTKTRNGAGGGNKVVDECYIPNYLLPKTQPELQWAWTNMEQYLSACLNLTERKRLVAQHLTHVSQTQEQNKENQNPNSDAPVIRSKTSARYMELVGWLVDKGITSEKQWIQEDQASYISFNAASNSRSQIKAALDNAGKIMSLTKTAPDYLVGQQPVEDISSNRIYKILELNGYDPQYAASVFLGWATKKFGKRNTIWLFGPATTGKTNIAEAIAHTVPFYGCVNWTNENFPFNDCVDKMVIWWEEGKMTAKVVESAKAILGGSKVRVDQKCKSSAQIDPTPVIVTSNTNMCAVIDGNSTTFEHQQPLQDRMFKFELTRRLDHDFGKVTKQEVKDFFRWAKDHVVEVEHEFYVKKGGAKKRPAPSDADISEPKRVRESVAQPSTSDAEASINYADRYQNKCSRHVGMNLMLFPCRQCERMNQNSNICFTHGQKDCLECFPVSESQPVSVVKKAYQKLCYIHHIMGKVPDACTACDLVNVDLDDCIFEQ

SEQ ID NO: 20 - protein, 312 aa, Adeno-associated virus
MELVGWLVDKGITSEKQWIQEDQASYISFNAASNSRSQIKAALDNAGKIMSLTKTAPDYLVGQQPVEDISSNRIYKILELNGYDPQYAASVFLGWATKKFGKRNTIWLFGPATTGKTNIAEAIAHTVPFYGCVNWTNENFPFNDCVDKMVIWWEEGKMTAKVVESAKAILGGSKVRVDQKCKSSAQIDPTPVIVTSNTNMCAVIDGNSTTFEHQQPLQDRMFKFELTRRLDHDFGKVTKQEVKDFFRWAKDHVVEVEHEFYVKKGGAKKRPAPSDADISEPKRVRESVAQPSTSDAEASINYADRLARGHSL

SEQ ID NO: 21 - protein, 397 aa, Adeno-associated virus
MELVGWLVDKGITSEKQWIQEDQASYISFNAASNSRSQIKAALDNAGKIMSLTKTAPDYLVGQQPVEDISSNRIYKILELNGYDPQYAASVFLGWATKKFGKRNTIWLFGPATTGKTNIAEAIAHTVPFYGCVNWTNENFPFNDCVDKMVIWWEEGKMTAKVVESAKAILGGSKVRVDQKCKSSAQIDPTPVIVTSNTNMCAVIDGNSTTFEHQQPLQDRMFKFELTRRLDHDFGKVTKQEVKDFFRWAKDHVVEVEHEFYVKKGGAKKRPAPSDADISEPKRVRESVAQPSTSDAEASINYADRYQNKCSRHVGMNLMLFPCRQCERMNQNSNICFTHGQKDCLECFPVSESQPVSVVKKAYQKLCYIHHIMGKVPDACTACDLVNVDLDDCIFEQ

SEQ ID NO: 22 - protein, 735 aa, Adeno-associated virus [sequence omitted]

SEQ ID NO: 23 - protein, 598 aa, Adeno-associated virus
MAPGKKRPVEHSPVEPDSSSGTGKAGQQPARKRLNFGQTGDADSVPDPQPLGQPPAAPSGLGTNTMATGSGAPMADNNEGADGVGNSSGNWHCDSTWMGDRVITTSTRTWALPTYNNHLYKQISSQSGASNDNHYFGYSTPWGYFDFNRFHCHFSPRDWQRLINNNWGFRPKRLNFKLFNIQVKEVTQNDGTTTIANNLTSTVQVFTDSEYQLPYVLGSAHQGCLPPFPADVFMVPQYGYLTLNNGSQAVGRSSFYCLEYFPSQMLRTGNNFTFSYTFEDVPFHSSYAHSQSLDRLMNPLIDQYLYYLSRTNTPSGTTTQSRLQFSQAGASDIRDQSRNWLPGPCYRQQRVSKTSADNNNSEYSWTGATKYHLNGRDSLVNPGPAMASHKDDEEKFFPQSGVLIFGKQGSEKTNVDIEKVMITDEEEIRTTNPVATEQYGSVSTNLQRGNRQAATADVNTQGVLPGMVWQDRDVYLQGPIWAKIPHTDGHFHPSPLMGGFGLKHPPPQILIKNTPVPANPSTTFSAAKFASFITQYSTGQVSVEIEWELQKENSKRWNPEIQYTSNYNKSVNVDFTVDTNGVYSEPRPIGTRYLTRNL

SEQ ID NO: 24 - protein, 533 aa, Adeno-associated virus
MATGSGAPMADNNEGADGVGNSSGNWHCDSTWMGDRVITTSTRTWALPTYNNHLYKQISSQSGASNDNHYFGYSTPWGYFDFNRFHCHFSPRDWQRLINNNWGFRPKRLNFKLFNIQVKEVTQNDGTTTIANNLTSTVQVFTDSEYQLPYVLGSAHQGCLPPFPADVFMVPQYGYLTLNNGSQAVGRSSFYCLEYFPSQMLRTGNNFTFSYTFEDVPFHSSYAHSQSLDRLMNPLIDQYLYYLSRTNTPSGTTTQSRLQFSQAGASDIRDQSRNWLPGPCYRQQRVSKTSADNNNSEYSWTGATKYHLNGRDSLVNPGPAMASHKDDEEKFFPQSGVLIFGKQGSEKTNVDIEKVMITDEEEIRTTNPVATEQYGSVSTNLQRGNRQAATADVNTQGVLPGMVWQDRDVYLQGPIWAKIPHTDGHFHPSPLMGGFGLKHPPPQILIKNTPVPANPSTTFSAAKFASFITQYSTGQVSVEIEWELQKENSKRWNPEIQYTSNYNKSVNVDFTVDTNGVYSEPRPIGTRYLTRNL

SEQ ID NO: 25 - protein, 204 aa, Adeno-associated virus
METQTQYLTPSLSDSHQQPPLVWELIRWLQAVAHQWQTITRAPTEWVIPREIGIAIPHGWATESSPPAPEPGPCPPTTTTSTNKFPANQEPRTTITTLATAPLGGILTSTDSTATFHHVTGKDSSTTTGDSDPRDSTSSSLTFKSKRSRRMTVRRRLPITLPARFRCLLTRSTSSRTSSARRIKDASRRSQQTSSWCHSMDTSP

SEQ ID NO: 26 - DNA, 145 bp, Adeno-associated virus
aggaacccctagtgatggagttggccactccctctctgcgcgctcgctcgctcactgaggccgggcgaccaaaggtcgcccgacgcccgggctttgcccgggcggcctcagtgagcgagcgagcgcgcagagagggagtggccaa

SEQ ID NO: 27 - DNA, 4675 bp, Adeno-associated virus
ttggccactccctctctgcgcgctcgctcgctcactgaggccgggcgaccaaaggtcgcccgacgcccgggctttgcccgggcggcctcagtgagcgagcgagcgcgcagagagggagtggccaactccatcactaggggttcctggaggggtggagtcgtgacgtgaattacgtcatagggttagggaggtcctgtattagaggtcacgtgagtgttttgcgacattttgcgacaccatgtggtcacgctgggtatttaagcccgagtgagcacgcagggtctccattttgaagcgggaggtttgaacgcgcagccgccatgccggggttttacgagattgtgattaaggtccccagcgaccttgacgggcatctgcccggcatttctgacagctttgtgaactgggtggccgagaaggaatgggagttgccgccagattctgacatggatctgaatctgattgagcaggcacccctgaccgtggccgagaagctgcagcgcgactttctgacggaatggcgccgtgtgagtaaggccccggaggcccttttctttgtgcaatttgagaagggagagagctacttccacatgcacgtgctcgtggaaaccaccggggtgaaatccatggttttgggacgtttcctgagtcagattcgcgaaaaactgattcagagaatttaccgcgggatcgagccgactttgccaaactggttcgcggtcacaaagaccagaaatggcgccggaggcgggaacaaggtggtggatgagtgctacatccccaattacttgctccccaaaacccagcctgagctccagtgggcgtggactaatatggaacagtatttaagcgcctgtttgaatctcacggagcgtaaacggttggtggcgcagcatctgacgcacgtgtcgcagacgcaggagcagaacaaagagaatcagaatcccaattctgatgcgccggtgatcagatcaaaaacttcagccaggtacatggagctggtcgggtggctcgtggacaaggggattacctcggagaagcagtggatccaggaggaccaggcctcatacatctccttcaatgcggcctccaactcgcggtcccaaatcaaggctgccttggacaatgcgggaaagattatgagcctgactaaaaccgcccccgactacctggtgggccagcagcccgtggaggacatttccagcaatcggatttataaaattttggaactaaacgggtacgatccccaatatgcggcttccgtctttctgggatgggccacgaaaaagttcggcaagaggaacaccatctggctgtttgggcctgcaactaccgggaagaccaacatcgcggaggccatagcccacactgtgcccttctacgggtgcgtaaactggaccaatgagaactttcccttcaacgactgtgtcgacaagatggtgatctggtgggaggaggggaagatgaccgccaaggtcgtggagtcggccaaagccattctcggaggaagcaaggtgcgcgtggaccagaaatgcaagtcctcggcccagatagacccgactcccgtgatcgtcacctccaacaccaacatgtgcgccgtgattgacgggaactcaacgaccttcgaacaccagcagccgttgcaagaccggatgttcaaatttgaactcacccgccgtctggatcatgactttgggaaggtcaccaagcaggaagtcaaagactttttccggtgggcaaaggatcacgtggttgaggtggagcatgaattctacgtcaaaaagggtggagccaagaaaagacccgcccccagtgacgcagatataagtgagcccaaacgggtgcgcgagtcagttgcgcagccatcgacgtcagacgcggaagcttcgatcaactacgcagacaggtaccaaaacaaatgttctcgtcacgtgggcatgaatctgatgctgtttccctgcagacaatgcgagagaatgaatcagaattcaaatatctgcttcactcacggacagaaagactgtttagagtgctttcccgtgtcagaatctcaacccgtttctgtcgtcaaaaaggcgtatcagaaactgtgctacattcatcatatcatgggaaaggtgccagacgcttgcactgcctgcgatctggtcaatgtggatttggatgactgcatctttgaacaataaatgatttaaatcaggtatggctgccgatggttatcttccagattggctcgaggacactctctctgaaggaataagacagtggtggaagctcaaacctggcccaccaccaccaaagcccgcagagcggcataaggacgacagcaggggtcttgtgcttcctgggtacaagtacctcggacccttcaacggactcgacaagggagagccggtcaacgaggcagacgccgcggccctcgagcacgtacaaagcctacgaccggcagctcgacagcggagacaacccgtacctcaagtacaaccacgccgacgcggagtttcaggagcgccttaaagaagatacgtcttttgggggcaacctcggacgagcagtcttccaggcgaaaaagagggttcttgaacctctgggcctggttgaggaacctgttaagacggctccgggaaaaaagaggccggtagagcactctcctgtggagccagactcctcctcgggaaccggaaaggcgggccagcagcctgcaagaaaaagattgaattttggtcagactggagacgcagactcagtacctgacccccagcctctcggacagccaccagcagccccctctggtctgggaactaatacgatggctacaggcagtggcgcaccaatggcagacaataacgagggcgccgacggagtgggtaattcctccggaaattggcattgcgattccacatggatgggcgacagagtcatcaccaccagcacccgaacctgggccctgcccacctacaacaaccacctctacaaacaaatttccagccaatcaggagcctcgaacgacaatcactactttggctacagcaccccttgggggtattttgacttcaacagattccactgccacttttcaccacgtgactggcaaagactcatcaacaacaactggggattccgacccaagagactcaacttcaagctctttaacattcaagtcaaagaggtcacgcagaatgacggtacgacgacgattgccaataaccttaccagcacggttcaggtgtttactgactcggagtaccagctcccgtacgtcctcggctcggcgcatcaaggatgcctcccgccgttcccagcagacgtcttcatggtgccacagtatggatacctcaccctgaacaacgggagtcaggcagtaggacgctcttcattttactgcctggagtactttccttctcagatgctgcgtaccggaaacaactttaccttcagctacacttttgaggacgttcctttccacagcagctacgctcacagccagagtctggaccgtctcatgaatcctctcatcgaccagtacctgtattacttgagcagaacaaacactccaagtggaaccaccacgcagtcaaggcttcagttttctcaggccggagcgagtgacattcgggaccagtctaggaactggcttcctggaccctgttaccgccagcagcgagtatcaaagacatctgcggataacaacaacagtgaatactcgtggactggagctaccaagtaccacctcaatggcagagactctctggtgaatccggccatggcaagccacaaggacgatgaagaaaagttttttcctcagagcggggttctcatctttgggaagcaaggctcagagaaaacaaatgtgaacattgaaaaggtcatgattacagacgaagaggaaatcggaacaaccaatcccgtggctacggagcagtatggttctgtatctaccaacctccagagaggcaacagacaagcagctaccgcagatgtcaacacacaaggcgttcttccaggcatggtctggcaggacagagatgtgtaccttcaggggcccatctgggcaaagattccacacacggacggacattttcacccctctcccctcatgggtggattcggacttaaacaccctcctccacagattctcatcaagaacaccccggtacctgcgaatccttcgaccaccttcagtgcggcaaagtttgcttccttcatcacacagtactccacgggacacggtcagcgtggagatcgagtgggagctgcagaaggaaaacagcaaacgctggaatcccgaaattcagtacacttccaactacaacaagtctgttaatcgtggacttaccgtggatactaatggcgtgtattcagagcctcgccccattggcaccagatacctgactcgtaatctgtaattgcttgttaatcaataaaccgtttaattcgtttcagttgaactttggtctctgcgtatttctttcttatctagtttccatggctacgtagataagtagcatggcgggttaatcattaactacaaggaacccctagtgatggagttggccactccctctctgcgcgctcgctcgctcactgaggccgggcgaccaaaggtcgcccgacgcccgggctttgcccgggcggcctcagtgagcgagcgagcgcgcagagagggagtggccaa

SEQ ID NO: 28 - protein, 536 aa, Adeno-associated virus
MPGFYEIVIKVPSDLDGHLPGISDSFVNWVAEKEWELPPDSDMDLNLIEQAPLTVAEKLQRDFLTEWRRVSKAPEALFFVQFEKGESYFHMHVLVETTGVKSMVLGRFLSQIREKLIQRIYRGIEPTLPNWFAVTKTRNGAGGGNKVVDECYIPNYLLPKTQPELQWAWTNMEQYLSACLNLTERKRLVAQHLTHVSQTQEQNKENQNPNSDAPVIRSKTSARYMELVGWLVDKGITSEKQWIQEDQASYISFNAASNSRSQIKAALDNAGKIMSLTKTAPDYLVGQQPVEDISSNRIYKILELNGYDPQYAASVFLGWATKKFGKRNTIWLFGPATTGKTNIAEAIAHTVPFYGCVNWTNENFPFNDCVDKMVIWWEEGKMTAKVVESAKAILGGSKVRVDQKCKSSAQIDPTPVIVTSNTNMCAVIDGNSTTFEHQQPLQDRMFKFELTRRLDHDFGKVTKQEVKDFFRWAKDHVVEVEHEFYVKKGGAKKRPAPSDADISEPKRVRESVAQPSTSDAEASINYADRLARGHSL

SEQ ID NO: 29 - protein, 621 aa, Adeno-associated virus
MPGFYEIVIKVPSDLDGHLPGISDSFVNWVAEKEWELPPDSDMDLNLIEQAPLTVAEKLQRDFLTEWRRVSKAPEALFFVQFEKGESYFHMHVLVETTGVKSMVLGRFLSQIREKLIQRIYRGIEPTLPNWFAVTKTRNGAGGGNKVVDECYIPNYLLPKTQPELQWAWTNMEQYLSACLNLTERKRLVAQHLTHVSQTQEQNKENQNPNSDAPVIRSKTSARYMELVGWLVDKGITSEKQWIQEDQASYISFNAASNSRSQIKAALDNAGKIMSLTKTAPDYLVGQQPVEDISSNRIYKILELNGYDPQYAASVFLGWATKKFGKRNTIWLFGPATTGKTNIAEAIAHTVPFYGCVNWTNENFPFNDCVDKMVIWWEEGKMTAKVVESAKAILGGSKVRVDQKCKSSAQIDPTPVIVTSNTNMCAVIDGNSTTFEHQQPLQDRMFKFELTRRLDHDFGKVTKQEVKDFFRWAKDHVVEVEHEFYVKKGGAKKRPAPSDADISEPKRVRESVAQPSTSDAEASINYADRYQNKCSRHVGMNLMLFPCRQCERMNQNSNICFTHGQKDCLECFPVSESQPVSVVKKAYQKLCYIHHIMGKVPDACTACDLVNVDLDDCIFEQ

SEQ ID NO: 30 - protein, 504 aa, Adeno-associated virus
MATGSGAPMADNNEGADGVGNSSGNWHCDSTWMGDRVITTSTRTWALPTYNNHLYKQISSQSGASNDNHYFGYSTPWGYFDFNRFHCHFSPRDWQRLINNNWGFRPKRLNFKLFNIQVKEVTQNDGTTTIANNLTSTVQVFTDSEYQLPYVLGSAHQGCLPPFPADVFMVPQYGYLTLNNGSQAVGRSSFYCLEYFPSQMLRTGNNFTFSYTFEDVPFHSSYAHSQSLDRLMNPLIDQYLYYLSRTNTPSGTTTQSRLQFSQAGASDIRDQSRNWLPGPCYRQQRVSKTSADNNNSEYSWTGATKYHLNGRDSLVNPAMASHKDDEEKFFPQSGVLIFGKQGSEKTNVNIEKVMITDEEEIGTTNPVATEQYGSVSTNLQRGNRQAATADVNTQGVLPGMVWQDRDVYLQGPIWAKIPHTDGHFHPSPLMGGFGLKHPPPQILIKNTPVPANPSTTFSAAKFASFITQYSTGHGQRGDRVGAAEGKQQTLESRNSVHFQLQQVC

SEQ ID NO: 31 - DNA, 4429 bp, Adeno-associated virus
ctccatcactaggggttcctggaggggtggagtcgtgacgtgaattacgtcatagggttagggaggtcctgtattagaggtcacgtgagtgttttgcgacattttgcgacaccatgtggttacgcagggtatataagcccgagtgagcacgcagggtctccattttgaagcgggaggtttgaacgcgcagccgccatgccgggattttacgagattgtgattaaggtccccagcgaccttgacgagcatctgcccggcatttctgacagctttgtgaactgggtggccgagaaggaatgggagttgccgccagattctgacatggatctgaatctgattgagcaggcacccctgaccgtggccgagaagctgcagcgcgactttctgacggagtggcgccgtgtgagtaaggccccggaggctcttttctttgtgcaatttgagaagggagagagctacttccacatgcacgtgctggtggagaccaccggggtgaaatccatggttttgggacgtttcctgagtcagattcgcgaaaaactgattcagagaatttaccgcgggatcgagccgactttgccaaactggttcgcggtcacaaagacccgaaatggcgccggaggcgggaacaaggtggtggatgagtgctacatccccaattacctgctccccaaaacccagcctgagctccagtgggcgtggactaatatggaacagtatttaagcgcctgtttgaatctcgcggagcgtaaacggttggtggcgcagcatctgacgcacgtgtcgcagacgcaggagcagaacaaagagaatcagaatcccaattctgacgcgccggtgattagatcaaaaacctcagccaggtacatggagctggtcgggtggctcgtggataaggggattacctcggagaagcagtggatccaggaggatcaggcttcatacatctcctttaatgcggcctccaactcgcggtcccagattaaggctgctctggacaatgcgggaaaaatcatgagcctcactaaaactgcccccgactacctggtgggccagcagcccgtggaggacatttccagcaatcggatttataaaatcttggaactgaacgggtacgacccccaatacgcggcttccgtcttcctgggatgggccacgaaaaagttcggcaagaggaacaccatctggctgtttgggcctgcaactaccggaaagaccaacatcgcggaggctatagcccacactgtgcctttttacgggtgcgtaaactggaccaatgagaactttcctttcaacgactgtgtcgacaagatggtgatctggtgggaggagggaaagatgaccgccaaggtcgtggagtcggccaaagccattctcggcggaagcaaggtgcgcgtggaccagaaatgcaagtcctcggcccagatagacccgactcccgtgatcgtcacctccaacaccaacatgtgcgccgtgattgacgggaactcaacgaccttcgagcaccagcagccgttgcaagaccggatgttcaaatttgaactcacccgccgtctggatcatgactttgggaaggtcacaaagcaggaagtcaaagactttttccggtgggcaaaggatcacgtggtagaggtggagcatgaattctacgtcaaaaagggtggagctaagaaaagacccgcccccagtgacgcagatataagtgagcccaaacgggcgcgcgagtcagttgcgcagccatcgacgtcagacgcggaagcttcgatcaactacgcagacaggtaccaaaacaaatgttctcgtcacgtgggcatgaatctgatgctgtttccctgcagacagtgcgagagaatgaatcagaattcaaatatctgcttcactcacggacagaaagactgtttagagtgctttcccgtgtcagaatctcaacccgtttctgtcgtcaaaaaggcgtatcagaaactgtgctacattcatcatatcatgggaaaggtaccagacgcttgcactgcctgcaacctggtcaatgtggatttggatgactgcatctctgaacaataaatgatttaaatcaggtatggctgccgatggttatcttccagattggctcgaggacactctctctgaaggaataagacagtggtggaagctcaaacctggcccaccaccgccaaagcccgcagagcggcataaggacgacagcaggggtcttgtgcttcctgggtacaagtacctcggacccttcaacggactcgacaagggagagccggtcaacgaggcagacgccgcggccctcgagcacgacaaggcctacgaccggcagctcgacagcggagacaacccgtacctcaagtacaaccacgccgacgcggagtttcaggagcgtcttaaagaagatacgtcttttgggggcaacctcggacgagcagtcttccaggccaaaaagaggattcttgaacctctgggcctggttgaggagcctgttaagacggctccgggaaaaaagaggccggtagagcactctcctgcggagccagattcctcctccggaactggaaagtcgggccaacagcctgcaagaaagagattgaatttcggtcagactggagacgcagactccgtacctgacccccagcctctcggacagccaccagcagccccctctggtctgggaactaatacgatggcttcaggcagtggcgcaccaatggcagacaataacgagggcgccgacggagtgggtaattcctcgggaaattggcattgcgattccacatggatgggcgacagagtcatcaccaccagcacccgcacctgggctctgcccacctacaacaaccatctgtacaagcagatttccagccagtctggagccagcaacgacaaccactactttggctacagcaccccctgggggtattttgacttcaacagattccactgccacttctccccacgtgactggcaaagactcatcaacaacaactggggattccggcccaagagactcagcttcaagctctttaacattcaagtcaaggaggtcacgcagaatgacggtacgacgacgattgccaataaccttaccagcacggttcaggtgtttactgactcggagtaccagctcccgtacgtcctcggctcggcgcatcaaggatgcctcccgccgttcccagcagacgtcttcatggtgccacagtatggatacctcaccctgaacaacggcagtcaggcggtaggacgctcttccttttactgcctggagtactttccttctcagatgctgcgtactggaaacaactttaccttcagctacacctttgaagacgttcctttccacagcagctacgctcacagccaaagtctggaccgtctcatgaatcctctcatcgaccagtacctgtattacttgagcagaacaaacacgccaagcggaaccaccacgatgtccaggcttcagttttctcaggccggagcaagtgacattcgggaccagtctagaaactggcttcctggaccctgttaccgccagcagcgagtatcaaagacagctgcggacaacaacaacagtgattactcgtggactggagctaccaagtaccacctcaatggaagagactctctggtgaatccgggcccagctatggccagccacaaggacgatgaagaaaaattttttcctcagagcggggttctcatctttggaaaacaagactcgggaaaaactaatgtggacattgaaaaggttatgattacagacgaagaggaaatcaggaccaccaatcccgtggctacggagcagtatggttctgtatctaccaacctccagagcggcaacacacaagcagctacctcagatgtcaacacacaaggcgttcttcctggcatggtctggcaggacagagacgtgtacctgcaggggcccatttgggcaaagattccccacacggatggacacttttacccttctcctcttatgggaggatttggactgaagcaccctcccccgcagattctcatcaagaataccccggtacctgcaaatccttcgaccaccttcagtgcggcaaagtttgcttctttcatcacacagtactccacggggcaggtcagcgtggagatagagtgggagctgcagaaggagaacagcaaacgctggaatcccgagatccagtatacttccaactataacaaatctgttaatgtggactttactgtggacactaatggtgtgtattcagagcctcgccccattggcaccagatacctgactcgtaatctgtaattgcttgttaatcaataaaccgtttaattcgtttcagttgaactttggtctctgcgtacttctttcttatctagtttccatggctacgtagataagtgccatggcgggtgaatcattaaccaaaaggaacccctagtgatggag

SEQ ID NO: 32 - DNA, 4429 bp, Adeno-associated virus
ctccatcactaggggttcctggaggggtggagtcgtgacgtgaattacgtcatagggttagggaggtcctgtattagaggtcacgtgagtgttttgcgacattttgcgacaccatgtggttacgctgggtatttaagcccgagtgagcacgcagggtctccattttgaagcgggaggtttgaacgcgcagccgccatgccggggttttacgagattgtgattaaggtccccagcgaccttgacgagcatttgcccggcatttctgacagctttgtgaactgggtggccgagaaggaatgggagttgccgccagattctgacatggatctgaatctgattgagcaggcacccctgaccgtggccgagaagctgcagcgcgactttctgacggagtggcgccgcgtgagtaaggccccggaggccctcttctttgtgcaatttgagaagggagagagctacttccacatgcacgtgctcgtggaaaccaccggggtgaaatccatggttttgggacgtttcctgagtcagattcgcgaaaaactgattcagagaatttaccgcgggatcgagccgactttgccaaactggttcgcggtcacaaagaccagaaacggcgccggaggcgggaacaaggtggtggatgagtgctacatccccaattacctgctccccaaaacccagcctgagctccagtgggcgtggactaatatggaacagtatttaagcgcctgtttgaatctcgcggagcgtaaacggttggtggcgcagcatctgacgcacgtgtcgcagacgcaggagcagaacaaagagaatcagaatcccaattctgacgcgccggtgattagatcaaaaacctcagccaggtacatggagctggtcgggtggctcgtggataaggggattacctcggagaagcagtggatccaggaggaccaggcctcatacatctccttcaatgcggcctccaactcgcggtcccagatcaaggctgctctggacaatgcggggaagatcatgagcctgactaaaaccgcccccgactacctggtgggccagcagcccgtggaggacatttccagcaatcggatttataaaatcttggaactgaacgggtacgatccccaatacgcggcttccgtctttctgggatgggccacgaaaaagttcggcaagaggaacaccatctggctgtttgggcctgcaactaccgggaagaccaacatcgcggaggccatagcccacactgtgcccttctacgggtgcgtaaactggactaatgagaactttcccttcaacgactgtgtcgacaagatggtgatctggtgggaggaggggaagatgaccgccaaggtcgtggagtcggccaaagctattctcggcggaagcaaggtgcgcgtggaccagaaatgcaagtcctcggcccagatagacccgactcccgtgatcgtcacctccaacaccaacatgtgcgccgtgattgacgggaactcaacgaccttcgagcaccagcagccgttgcaagaccggatgttcaaatttgaactcacccgccgtctggatcatgactttgggaaggtcaccaagcaggaagtcaaagactttttccggtgggcaaaggatcacgtggttgaggtggagcatgaattctacgtcaaaaagggtggagccaagaaaagacccgcccccagtgacgcagatataagtgagcccaaacgggcgcgcgagtcagttgcgcagccatcgacgtcagacgcggaagcttcaatcaactacgcggacaggtaccaaaacaaatgttctcgtcacgtgggcatgaatctgatgctgtttccctgcagacaatgcgagagaatgaatcagaattcaaatatctgcttcactcacggacagaaagactgtttagagtgctttcccgtgtcagaatctcaacccgtttctgtcgtcaaaaaggcgtatcagaaactttgctacattcatcatatcatgggaaaggtaccagacgcttgcactgcctgcaacctggtcaatgtggatttagatgactgcatctctgaacaataaatgatttaaatcaggtatggctgccgatggttatcttccagattggctcgaggacactctctctgaaggaataagacagtggtggaagctcaaacctggcccaccaccaccaaagcccgcagagcggcacaaggacgacagcaggggtcttgtgcttcctgggtacaagtacctcggacccttcaacggactcgacaagggggagccggtcaacgaggcagacgccgcggccctcgagcacgacaaggcctacgaccggcagctcgacagcggagacaacccgtacctcaagtacaaccacgccgacgcggagtttcaggagcgtcttaaagaagatacgtcttttgggggcaacctcggacgagcagtcttccaggcgaaaaagagggttcttgaacctctgggcctggttgaggaacctgttaaaacggctccgggaaaaaagaggccggtagagcactctcctgcggagccagactcctcctcgggaaccggaaaagcgggcaaccagcctgcaagaaaaagattgaatttcggtcagactggagacgcagactccgtacctgacccccagcctctcggacagccaccagcagccccctctggtctgggaactaatacgatggctacaggcagtggcgcaccaatggcagacaataacgagggcgccgacggagtgggtaattcctcgggaaattggcattgcgattccacatggatgggcgacagagtcatcaccaccagcacccgcacctgggctctgcccacctacaacaaccatctgtacaagcagatttccagccaatcaggagcctcaaacgacaaccactactttggctacagcaccccctgggggtattttgacttcaacagattccactgccacttttcaccacgtgactggcaaagactcatcaacaacaactggggattccggcccaagagactcagcttcaagctctttaacattcaagtcaaggaggtcacgcagaatgacggtacgacgacgattgccaataaccttaccagcacagttcaggtgtttactgactcggagtaccagctcccgtacgtcctcggctcggcgcatcaaggatgcctcccgccgttcccagcagacgtcttcatggtgccacagtatggatacctcaccctgaacaacggcagtcaggcggtaggacgctcttccttttactgcctggagtactttccttctcagatgctgcgtactggaaacaactttaccttcagctacacctttgaagacgttcctttccacagcagctacgctcacagccaaagtctggaccgtctcatgaatcctctcatcgaccagtacctgtattacttgagcagaacaaacacaccaagcggaaccaccacgatgtccaggcttcagttttctcaggccggagcaagtgacattcgggaccagtctagaaactggcttcctggaccctgttaccgccagcagcgagtatcaaagacagctgcggacaacaacaacagtgattactcgtggactggagctaccaagtaccacctcaatggaagagactctctggtgaatccgggcccagctatggccagccacaaggacgatgaagaaaaatattttcctcagagcggggttctcatctttggaaaacaagactcgggaaaaacaaatgtggacattgaaaaggttatgattacagacgaagaggaaatcaggaccaccaatcccgtggctacggagcagtatggttctgtatctaccaacctccagagcggcaacacacaagcagctacctcagatgtcaacacacaaggcgttcttcctggcatggtctggcaggacagagacgtgtacctgcaggggcccatctgggcaaagattccacacacggacggacattttcacccttctcctcttatgggaggatttggactgaagcaccctcccccgcagattctcatcaagaataccccggtacctgcgaatccttcgaccaccttcagtgcggcaaagtttgcttctttcatcacacagtactccacggggcaggtcagcgtggagatagagtgggagctgcagaaagaaaacagcaaacgctggaaccccgagattcagtatacctccaactacaacaagtctgttaatgtggactttactgtggacactaatggcgtgtattcagagcctcgccccattggcacaagatacctgactcgtaatttgtaattgcttgttaatcaataaaccgtttaattcgtttcagttgaactttggtctctgtgtgcttctttcttatctagtttccatggctacgtagataagtagcatggagggttaatcattaactctaaggaacccctagtgatggag

SEQ ID NO: 33 - DNA, 4429 bp, Adeno-associated virus
ctccatcactaggggttcctggaggggtggagtcgtgacgtgaagtacgtcatagggttagggaggtcctgtattagaggtcacgtgagtgttttgcgacattttgcgacaccatgtgcttacgctgggtatttaagcccgagtgagcacgcagggtctccattttgaagcgggaggtttgaacgcgcagccgccatgccggggttttacgagattgtgattaaggtccccagcgaccttgacgagcatctgcccggcatttctgacagctttgtgaactgggtggccgagaaggaatgggagttgccgccagattctgacatggatctgaatctgattgagcaggcacccctgaccgtggccgagaagctgcagcgcgactttctgacagaatggcgccgtgtgagtaaggcccccgaggccctcttctttgtgcaatttgagaagggagaaagctatttccacatgcacgtgctggtggagactaccggggtgaaatccatggttttgggacgtttcctgagtcagattcgcgaaaaactgattcagagaatttaccgcgggatcgagccgactttgccaaattggttcgcggtcacaaagactcgaaatggcgccggaggcgggaacaaggtggtggatgagtgctacatccccaattacctgctccccaaaacccaacccgagctccagtgggcgtggactaatatggaacagtatttaagcgcctgtttgaatctcgcggagcgtaaacggttggtggcgcagcatctgacgcacgtgtcgcagacgcaggagcagaacaaagagaatcagaatctcaattctgacgcgccggtgattagatcaaaaacctcagccaggtacatggagctggtcgggtggctcgtggataaggggattacctccgagaagcagtggattcaggaggaccaggcctcatacatttccttcaatgcggcctccaactcgcggtcccagatcaaggctgctctggacaatgcgggaaagatcatgagcctgactaaaactgcccccgactacctggtgggccagcagcccgtggaggacatttccggcaatcggatttataaaatcttggaactgaacgggtacgatccccaatacgcggcttccgtctttctgggatgggccacgaaaaagttcggaaagaggaacaccatctggctgtttgggcctgcaaccaccgggaagaccaacatcgcggaggccatagcccacacggtgcctttttacgggtgcgtgaactggaccaatgagaactttccgttcaatgattgcgtcgacaagatggtgatctggtgggaggaggggaagatgaccgccaaggtcgtggagtcggccaaagccattctcggaggaagcaaggtgcgcgtggaccaaaagtgcaagtcttcggcccagatagacccgactcccgtgattgtcacctccaacacaaacatgtgcgccgtgattgacgggaactcaacgaccttcgaacaccagcagccgttgcaagaccggatgttcaaatttgaactcacccgccgtctggatcatgactttggaaaggtcaccaagcaggaagtcaaagactttttccggtgggcaaaggatcacgtggttgaggtggagcatgaattctacgtcaaaaagggtggagctaaaaaaaggcccgcccccagtgacgcagatataagtgagcccaaacgggcgcgcgagtcagttgcgcagccatcgacgtcagacgcggaagcttcgatcaactacgcggacaggtaccaaaacaaatgttctcgtcacgtgggcatgaatctgatgctgtttccctgcagacaatgcgagagaatgaatcagaattcaaatatttgcttcactcacggacagaaagactgtttagagtgctttcccgtgtcagaatctcaacccgtttctgtcgtcaaaaaggcgtatcagaaactttgctacattcatcatatcatgggaaaggtgccagacgcttgcactgcctgcgatgtggtcaacgtggatttggatgactgcatctctgaacaataaatgatttaaatcaggtatggctgccgatggttatcttccagattggctcgaggacactctctctgaaggaataagacagtggtggaagctcaaacctggcccaccaccaccaaagcccgcagagcggcataaggacgacagcaggggtcttgtgcttcctgggtacaagtacctcggacccttcaacggactcgacaaaggagagccggtcaacgaggcagacgccgcggccctcgagcacgacaaggcctacgaccggcagctggaaagcggagacaacccgtacctcaagtacaaccacgccgacgcggagtttcaggagcgtcttaaagaagatacgtcttttgggggcaacctcggacgagcagtattccaggcgaaaaagagggttcttgaacctctgggcctggttgaggagcctgttaagacggctccgggaaaaaagaggccggtagagcactctcctgcggagccagactcctcctccggaactggaaagtcgggcaaccagcctgcaagaaagagattaaacttcggtcagactggagactcagactccgtacctgacccccagcctctcggacaaccaccagcagccccctctggtctgggaactaatacgatggctacaggcagtggcgcaccaatggcagacaataacgagggcgccgacggagtgggtaattcctcgggaaattggcattgcgattccacatggatgggcgacagagtcatcaccaccagcacccgcacctgggctctgcccacctacaacaaccatctgtacaagcagatttccagccaatcaggagcctcgaacgacaaccactactttggctacagcaccccctgggggtattttgacttcaacagattccactgccacttttcaccacgtgactggcaaagactcatcaacaacaattggggattccggcccaaaagactcaacttcaagctctttaacattcaagtcaaggaggtcacgcagaatgacggtacgacgacgattgccaataaccttaccagcacggttcaggtgtttactgactcggagtaccagctcccgtacgtccttggctcggcgcatcaaggatgcctcccgccgttcccagcagacgtcttcatggtgccacagtatggatacctcaccctgaacaacgggagtcaggcggtaggacgctcttccttttactgcctggagtactttccttctcaaatgctgcgtaccggaaacaactttaccttcagctacacctttgaggacgttcctttccacagcagctacgctcacagccagagtttggaccgtctcatgaatcctctcatcgaccagtacctgtattacttgagcagaacaaacacgccgagcggaaccaccacgcagtccaggcttcagttttctcaggccggagcgagtgacattcgggaccagtctaggaattggcttcctggaccctgttaccgccagcagcgagtatcaaagacacctgcggataataacaacagtgaatactcgtggactggagctaccaagtaccacctcaatggcagagactctctggtgaatccgggcccggccatggccagccacaaggatgatgaagaaaagtttttcccccaaagcggggttctcatctttgggaagcaaggctcagagaaaacaaatgtggacattgaaaaggtcatgattacagacgaagaggaaatcaggaccaccaatcccgtggctacggagcagtatggtactgtatctaccaaccttcagagcagcaacacacaagcagctacctcagatgtcaacacacaaggcgttcttccaggcatggtctggcaggacagagacgtgtacctgcaggggcctatctgggcaaagattccacacacggacggacattttcacccctctcccctcatgggcggattcggacttaaacaccctcctcctcagattctcatcaagaacaccccggtacctgcgaatccttcgaccaccttcagtgcggcaaagtttgcttccttcatcacacagtactccacagggcaggtcagtgtggagatcgagtgggagctgcagaaggagaacagcaaacgctggaatcccgagatccagtacacttccaactataacaagtctgttaatgtggactttactgtggacactaatggtgtgtattcagagcctcgccccattggcaccagatacctgactcgtaatctgtaattgcttgttaatcaataaaccgtttaattcgtttcagttgaactttggtctctggctcgttctttcttatctagtttccatggctacgtagataagtagcatggcgggttaatcattaactctaaggaacccctagtgatggag

SEQ ID NO: 34 - DNA, 4430 bp, Adeno-associated virus
ctccatcactaggggttcctggaggggtggagtcgtgacgtgaagtacgtcatagggttagggaggtcctgtattagaggtcatgtgagtgttttgcgacattttgcgacaccatgtggtcacgctgggtatttaagcccgagtgagcacgcagggtctccattttgaagcgggaggtttgaacgcgcagccgccatgccggggttttacgagattgtgattaaggtccccagcgaccttgacgagcatctgcccggcatttctgacagctttgtgaactgggtggccgagaaggaatgggagttgccgccagattctgacatggatctgaatctgattgagcaggcacccctgaccgtggccgagaagctgcagcgcgactttctgacggaatggcgccgtgtgagtaaggcccccgaggccctcttctttgtgcaatttgagaagggagagagctatttccacatgcacgtgctcgtggaaaccacgggggtgaagtccatggttttaggacgtttcctgagtcagattcgcgaaaaactgattcagagaatttaccgcgggatcgagccgactttgccaaactggttcgcggtcacaaagaccagaaatggcgccggaggcgggaacaaggtggtggatgagtgctacatccccaattacctgctccccaaaacccagcctgagctccagtgggcgtggactaatatggaacagtatttaagcgcctgtttgaatctcgcggagcgtaaacggttggtggcgcagcatctgacgcacgtgtcgcagacgcaggagcagaacaaagagaatcagaatcccaattctgacgcgccggtgattagatcaaaaacctcagccaggtacatggagcttgtcgggtggctcgtggataaggggattacctcggagaagcagtggatccaggaggaccaggcttcatacatctccttcaatgcggcctccaactcgcggtcccaaatcaaggctgctctggacaatgcgggaaagatcatgagcctgactaaaaccgcccccgactacctggtgggccagcagcccgtggaggacatttccagcaatcggatttataaaatcttggaactgaacgggtacgatccccaatatgcggcttccgtctttctgggatgggccacaaaaaagtttggcaagaggaacaccatctggctgtttgggcctgcaactaccgggaagaccaacatcgcggaggccatagcccacacggtgcccttctacgggtgcgtaaactggaccaatgagaactttccctttaacgactgcgtcgacaagatggtgatctggtgggaggagggaaagatgaccgccaaggtcgtggagtcggccaaagccattctcggaggaagcaaggtgcgcgtggaccagaaatgcaagtcctcggcccagatagacccgactcccgtgatcgtcacctccaacaccaacatgtgcgccgtgattgacgggaactcaacgaccttcgaacaccagcagccgttgcaagaccggatgttcaaatttgaactcacccgccgtctggatcatgactttgggaaggtcaccaagcaggaagtcaaagactttttccggtgggcaaaggatcacgtggttgaggtggagcatgaattctacgtcaaaaagggtggagccaagaaaagacccgcccccagtgacgcagatataagtgagcccaaacgggcgcgcgagtcagttgcgcagccatcgacgtcagacgcggaagcttcgatcaactacgcggacaggtaccaaaacaaatgttctcgtcacgtgggcatgaatctgatgctgtttccctgcagacaatgcgagagaatgaatcagaattcaaatatctgcttcactcacggacagaaagactgtttagagtgctttcccgtgtcagaatctcaacccgtttctgtcgtcaaaaaggcgtatcagaaactttgctacattcatcatatcatgggaaaggtgccagacgcttgcactgcctgcgatgtggtcaatgtggatttagatgactgcatctctgaacaataaatgatttaaatcaggtatggctgccgatggttatcttccagattggctcgaggacactctctctgaaggaataagacagtggtggaagctcaaacctggcccaccaccaccaaagcccgcagagcggcacaaggacgacagcaggggtcttgtgcttcctgggtacaagtacctcggacccttcaacggactcgacaagggagagccggtcaacgaggcagacgccgcggccctcgagcacgacaaggcctacgaccggcagctcgacagcggagacaacccgtacctcaagtacaaccacgccgacgcggagtttcaggagcgtcttaaagaagatacgtcttttgggggcaacctcggacgagcagtcttccaggccaaaaagaggattcttgaacctctgggcctggttgaggagcctgttaagacggctccgggaaaaaagaggccggtagagcactctcctgtggagccagactcctcctccggaactggaaagtcgggccaacagcctgcaagaaagagattgaattttggtcagactggagacgcagactccgtacctgacccccagcctctcggacagccaccagcagccccctctggtctgggaactaatacgatggcttcaggcagtggcgcaccaatggcagacaataacgagggcgccgacggagtgggtaattcctcgggaaattggcattgcgattccacatggatgggcgacagagtcatcaccaccagcacccgaacctgggctctgcccacctacaacaaccatctgtacaagcagatttccagccagtctggagccagcaacgacaaccactactttggctacagcaccccctgggggtattttgacttcaacagattccactgccacttctccccacgtgactggcaaagactcatcaacaacaactggggattccggcccaagagactcagcttcaagctctttaacattcaagtcaaggaggtcacgcagaatgacggtacgacgacgattgccaataaccttaccagcacggttcaggtgtttactgactcggagtaccagctcccgtacgtcctcggctcggcgcatcaaggatgcctcccgccgttcccagcagacgtcttcatggtgccacagtatggatacctcaccctgaacaacgggagtcaggcagtaggacgctcttcattttactgcctggagtactttccttctcagatgctgcgtaccggaaacaactttaccttcagctacacctttgaggacgttcctttccacagcagctacgctcacagccaaagtctggaccgtctcatgaatcctctcatcgaccagtacctgtattacttgagcagaacaaacacgccaagcggaaccaccacgatgtccaggcttcagttttctcaggccggagcaagtgacattcgggaccagtctagaaactggcttcctggaccctgttaccgccagcagcgagtatcaaagacagctgcggacaacaacaacagtgattactcgtggactggagctaccaagtaccaccttaatggaagagactctctggtgaatccgggcccagctatggccagccacaaggacgatgaagaaaaatattttcctcagagcggggttctcatctttggaaaacaagactcgggaaaaactaatgtggacattgaaaaggttatgattacagacgaagaggaaatcaggaccaccaatcccgtggctacggagcagtatggttctgtatctaccaacctccagagcggcaacacacaagcagctaccgcagatgtcaacacacaaggcgttcttcctggcatggtctggcaggatagagacgtgtacctgcaggggcccatctgggcaaagattccacacacagacggacattttcacccctctcccctcatgggcggatttggacttaaacaccctcctccacagattctcatcaagaataccccggtacctgcgaatccttcgaccacctttagtgcggcaaagtttgcttctttcatcacacagtattccacgggacaggtcagcgtggagatagagtgggagctgcagaaggagaacagcaaacgctggaatcccgagatccagtatacctctaactacaacaagtctgttaatgtggactttactgtggacactaatggcgtgtattcagagcctcgccccattggcaccagatacctgactcgtaatctgtaatttcttgttaatcaataaaccgtgtaattcgtttcagttgaactttggtctccgcgtacttcttttcttatctagtttccatggctacgtagataagtagcatggcgggttaatcattaactacaaggaacccctagtgatggag

SEQ ID NO: 35 - DNA, 4429 bp, Adeno-associated virus
ctccatcactaggggttcctggaggggtggagtcgtgacgtgaagtacgtcatagggttagggaggtcctgtattagaggtcacgtgagtgttttgcgacattttgcgacaccatgtggtcacgctgggtatttaagcccgagtgagcacgcagggtctccattttgaagcgggaggtttgaacgcgcagccgccatgccggggttttacgagattgtgattaaggtccccagcgaccttgacgagcatctgcccggcatttctgacagctttgtgaactgggtggccgagaaagaatgggagttgccgccagattctgacatggatctgaatctgattgagcaggcacccctgaccgtggccgagaagctgcagcgcgactttctgacggagtggcgccgcgtgagtaaggccccggaggccctcttctttgtgcaatttgagaagggagagagctacttccacatgcatgtgctggtggagaccaccggggtgaaatccatggttttgggacgtttcctgagtcagattcgcgaaaaactgattcagagaatttaccgcgggatcgagccgactttgccaaactggttcgcggtcacaaagacccgaaatggcgccggaggcgggaacaaggtggtggatgagtgctacatccccaattacctgctccccaaaacccagcctgagctccagtgggcgtggactaatatggaacagtatttaagcgcctgtttgaatctcgcggagcgtaaacggttggtggcgcagcatctgacgcacgtgtcgcagacgcaggagcagaacaaagagaatcagaatcccaattctgacgcgccggtgattagatcaaaaacctcagccaggtacatggagctggtcgggtggctcgtggataaggggattacctcggagaagcagtggatccaggaggaccaggcctcatacatctccttcaatgcggcctccaactcgcggtcccagattaaggctgctttggacaatgcggggaagatcatgagcctcactaaaaccgcccccgattacctggtgggccaacagcccgtggatgacatttccagcaatcggatttataaaatcttggaactgaacgggtatgatccgcaatacgcggcttccgtcttcctgggatgggctacgaaaaagttcggcaagaggaacaccatctggctgtttgggcctgcgaccacggggaagaccaacatcgcggaggctatagcccacactgtgcctttttacgggtgcgtaaactggaccaatgaaaactttccgttcaacgactgcgtcgacaagatggtgatctggtgggaggagggaaagatgaccgccaaggttgtggagtcggccaaagccattctcggcggaagcaaggtgcgagtggaccagaaatgcaagtcctcggcccagatagacccgactcccgtgatcgtcacctccaacaccaacatgtgcgccgtgattgacgggaactcaacgaccttcgagcaccagcagccgttgcaagaccggatgttcaaatttgaactcacccgccgtctggatcatgactttgggaaggtcaccaagcaggaagtcaaagactttttccggtgggcccaagaccacgtggtagaggtggagcatgaattctacgtcaaaaagggtggagctaagaaaagacccgcccccagtgacgcagatataagtgagcccaaacgggcgcgcgagtcagttgcgcagccatcgacgtcagacgcggaagcttcgatcaactacgcggacaggtaccaaaacaaatgttctcgtcacgtgggcatgaatttgatgctgtttccctgcagacaatgcgagagaatgaatcagaattcaaatatctgcttcactcacggacagaaagactgtttagagtgctttcccgtgtcagaatctcaacccgtttctgtcgtcaaaaaggcgtatcagaaactttgctacattcatcatatcatgggaaaggtaccagacgcttgcactgcttgcaacctggtcaatgtggatttggatgactgcatctctgaacaataaatgatttaaatcaggtatggctgccgatggttatcttccagattggctcgaggacactctctctgaaggaataagacagtggtggaagctcaaacctggcccaccaccaccaaagcccgcagagcggcataaggacgacagcaggggtcttgtgcttcctgggtacaagtacctcggacccttcaacggactcgacaagggggagccggtcaacgaggcagacgccgcggccctcgagcacgacaaggcctacgaccggcagctcgacagcggagacaacccgtacctcaagtacaaccacgccgacgcggagtttcaggagcgtcttaaagaagatacgtcttttgggggcaacctcggacgagcagtcttccaggccaaaaagaggattcttgaacctctgggcctggttgaggagcctgttaagacggctccgggaaaaaagaggccggtagagcactctcctgcggagccagattcctcctccggaactggaaagtcgggccaacagcctgcaagaaagagattgaattttggtcagactggagacgcagactccgtacctgacccccagcctctcggacagccaccagcagccccctctggtctgggaactaatacgatggcttcaggcagtggcgcaccaatggcagacaataacgagggcgccgacggagtgggtaattcctcgggaaattggcattgcgattccacatggatgggcgacagagtcatcaccaccagcacccgcacctgggctctgcccacctacaacaaccatctgtacaagcagatttccagccagtctggagccagcaacgacaaccactactttggctacagcaccccctgggggtattttgacttcaacagattccactgccacttctccccacgtgactggcaaagactcatcaacaacaactggggattccggcccaagagactcagcttcaagctctttaacattcaagtcaaggaggtcacgcagaatgacggtacgacgacgattgccaataaccttaccagcacggttcaggtgtttactgactcggagtaccagctcccgtacgtcctcggctcggcgcatcaaggatgcctcccgccgttcccagcagacgtcttcatggtgccacagtatggatacctcaccctgaacaacggcagtcaggcggtaggacgctcttccttttactgcctggagtactttccttctcagatgctgcgtactggaaacaactttaccttcagctacacctttgaagacgttcctttccacagcagctacgctcacagccaaagtctggaccgtctcatgaatcctctcatcgaccagtacctgtattacttgagcagaacaaacacgccaagcggaaccaccacgatgtccaggcttcagttttctcaggccggagcaagtgacattcgggaccagtctagaaactggcttcctggaccctcttaccgccagcagcgagtatcaaagacagctgcggacaacaacaacagtgattactcgtggactggagctaccaagtaccaccttaatggaagagactctctggtgaatccgggcccagctatggccagccacaaggacgatgaagaaaaatattttcctcagagcggggttctcatctttggaaaacaagactcgggaaaaactaatgtggacattgaaaaggttatgattacagacgaagaggaaatcaggaccaccaatcccgtggctacggagcagtatggttctgtatctaccaacctccagagcggcaacacacaagcagctaccgcagatgtcaacacacaaggcgttcttccaggaatggtctggcaggacagagacgtgtacctacagggacccatctgggcaaagattccacacacggacggacattttcacccctctcccctcatgggcggattcggacttaaacaccctcctccacagattctcatcaagaacaccccggtacctgcgaatccttcgaccactttcagtgcggcaaagtttgcttccttcattacacagtactccacggggcaggtcagcgtggagatcgagtgggagctgcagaaagagaacagcaaacgctggaatcccgaaattcagtacacttccaactacaacaaatctgttaatgtggactttactgtggacactaatggtgtgtattcagagcctcgccccattggcaccagatacctgactcgtaatctgtaattgcttgttaatcaataaaccgtgtaattcgtttcagttgaactttggtctctgtgtacttctttcttatctagtttccatggctacgtagataagtaccatggcgggttaatcattaactctaaggaacccctagtgatggag

SEQ ID NO: 36 - DNA, 4430 bp, Adeno-associated virus
ctccatcactaggggttcctggaggggtggagtcgtgacgtgaagtacgtcatagggttagggaggtcctgtattagaggtcacgtgagtgttttgcgacattttgcgacaccatgtggttacgctgggtatttaagcccgagtgagcacgcagggtctccattttgaagcgggaggtttgaacgcgcagccgccatgccggggttttacgagattgtgattaaggtccctagcgaccttgacgagcatctgcccggcatttctgacagctttgtgaactgggtagccgagaaggaatgggagttgccgccagattctgacatggatctgaatctgattgagcaggcacccctgaccgtggccgagaagctgcagcgcgactttctgacagaatggcgccgtgtgagtaaggcccccgaggcccttttctttgtgcaatttgagaagggagagagctatttccacatgcacgtgctcgtggaaaccacgggggtgaagtccatggtgttaggacgtttcctgagtcagattcgcgaaaaactgattcagagaatttaccgcgggatcgagccgactttgccaaattggtttgcggtcacaaagacccgaaatggcgctggaggcgggaacaaggtggtggatgagtgctacatccccaattacctgctccccaaaacccaacctgagctccagtgggcgtggactaatatggaacagtatttaagcgcctgtttgaatctcgcggagcgtaaacggttggtggcgcagcatctgacgcacgtgtcgcagacccaggagcagaacaaagagaatcagaatcccaattctgacgcgccggtgatcagatcaaaaacctcagccaggtacatggagctggtcgggtggctcgtggataaggggattacctccgagaagcagtggattcaggaggaccaggcctcatacatctccttcaatgcggcctccaactcgcggtcccaaatcaaggctgctctggacaatgcgggaaagatcatgagcctgactaaaacggcccccgactacctggtgggccagcagcccgtggaggacatttccggcaatcggatttataaaatattggaactgaacgggtacgatccccaatacgcggcttccgtctttctgggatgggccacgaaaaagttcggcaagaggaacaccatctggctgtttgggcctgcaactaccgggaagaccaacatcgcggaggccatagcccacacggtgcccttctacgggtgcgtaaactggaccaatgagaactttccctttaacgactgcgtcgacaagatggtgatctggtgggaggaggggaagatgaccgccaaggttgtggagtcggccaaagccattctcggcggaagcaaggtgcgcgtggaccaaaagtgcaagtcttcggcccagatcgaccccactcccgtgatagtcacctccaacaccaacatgtgcgccgtgattgacgggaactcaacgaccttcgagcaccagcagccgttgcaagatcggatgttcaaatttgaacttacccgccgtctggatcatgactttggaaaggtcaccaagcaggaagtgaaagactttttccggtgggcaaaggatcacgtggttgaggtggagcatgaattctacgtcaaaaagggtggagctaagaaaaggcccgcccccagtgacgcagatataagtgagcccaaacgggcgcgcgagtcagttgcgcagccatcgacgtcagacgcggaagcttcaatcaactacgcggacaggtaccaaaacaaatgttctcgtcacgtgggcatgaatctgatgctgtttccctgcagacaatgcgagagaatgaatcaaaattcaaatatctgctttactcacggacagaaagactgtttagagtgctttcccgtgtcagaatctcaacccgtttctgtcgtcaaaaaggcgtatcagaaactttgctacattcatcatatcatgggaaaagtgccagacgcttgcactgcttgcgacctggtcaatgtggatttggatgactgcatctctgaacaataaatgatttaaatcaggtatggctgccgatggttatcttccagattggctcgaggacactctctctgaaggaataagacagtggtggaagctcaaacctggcccaccaccgccaaagcccgcagagcggcataaggacgacagcaggggtcttgtgcttcctgggtacaagtacctcggacccttcaacggactcgacaaaggagagccggtcaacgaggcagacgccgcggccctcgagcacgacaaggcctacgaccggcagctcgacagcggagacaacccgtacctcaagtacaaccacgccgacgcggagtttcaggagcgtcttaaagaagatacgtcttttgggggcaacctcggacgagcagtcttccaggcaaaaaagagggttcttgaacctctgggcctggttgaggagcctgttaagacggctcctggaaaaaagaggccggtagagcactctcctgcggagccagattcctcctccggaactggaaagtcgggccaacagcctgcaagaaaaagactgaatttcggtcagactggagactcagactccgtaccagaccctcaacctctcggagaaccaccagcagcccccacaagtttgggatctactacaatggcttcaggcggtggcgcaccagtggcagacaataacgagggtgccgatggagtgggtaattcctcgggaaattggcattgcgattcccaatggctgggcgacagagtcatcaccaccagcacccgaacctgggccctgcccacctacaacaaccatctgtacaagcagatatccagccagtctggagccagcaacgacaaccactacttcggctacagcaccccctgggggtattttgacttcaacagattccactgccacttttcaccacgtgactggcaaagactcatcaacaacaactggggattccggcccaaaagactcaacttcaagctctttaacattcaagtcaaagaggtcacgcagaatgacggtacgacgacgattgccaataaccttaccagcacggttcaggtgtttactgactcggagtaccagctcccgtacgtcctcggctcggcgcatcaaggatgcctcccgccgttcccagcagacgtattcatggtgccacagtatggatacctcaccctgaacaacgggagtcaggcggtaggacgctcttcattttactgcctggagtacttcccttctcagatgctgcgtacaggaaacaacttccaattcagctacacctttgaggacgttcctttccacagcagctacgctcacagccagagtctggatcggctgatgaatcctctgatcgaccagtacctgtattatctgaacaagacacaatcagccagtggaactgttcagcagtctcggctactgtttagccaagctggacccaccagcatgtctcttcaagctaaaaactggctgcctggaccttgctacagacagcagcgtctgtcaaagcaggcaaacgaaaacaacaacagcaactttccctggactgcggctaccaagtatcatctaaatggccgggactcgttggttaatccaggaccgcctatggcaagtcacaaggatgacgaagaaaagtttttccccatgcacggaaccctgatatttggtaaagaaggaacaaatgctaacaacgcagaattggaaaatgtcatgattacagatgaagaagaaatccgcaccacaaatcctgtagctacagagcagtacggcaatgtgtcaaataatttgcaaaactcaaatactgctccgagtactggaactgtcaatcaccaaggagcgttacctggtatggtgtggcaggatagagacgtgtacctgcagggacccatttgggccaagattcctcacaccgatggacactttcatccttctccgctgatgggaggttttggactcaaacacccacctcctcagatcatgatcaaaaacactcccgttccagccaatcctcctacaaacttcagtgcggcaaaatttgcttcctttatcacacagtattccacggggcaggtcagcgtggaaatcgagtgggagctgcagaaggagaacagcaaacgctggaatcccgagatccagtacacttccaactacaacaagtctgttaatgtggactttactgtggacactaatggcgtgtattcagagcctcgccccattggcaccagatacctgactcgtaatctgtaattgcttgttaatcaataaaccgtttaattcgtttcagttgaactttggtctctgcgtacttcttttcttatctagtttccatggctacgtagataagtagcatggagggttaatcattaactacaaggaacccctagtgatggag

SEQ ID NO: 37 - DNA, 2977 bp, Adeno-associated virus
ggtgcgtaaactggaccaatgagaactttcccttcaacgactgcgtggacaagatgctcatctggtgggaggagggcaagatgaccaacaaggtggtcgagtccgccaaggccatcctgggcggctcccgtgtgagagtggaccagaagtgtaagtcttctgcccagatagacgccaccccggtcatcgtcacctccaacaccaacatgtgtatcgtggtggacggaaactcgacgacgttcgaacatcagcagccgctggaggaccgaatgttcaagtttgagctgacgaagcggctcccgccggactttggcaagatcaccaagagggaggtcaaagacttttttgcctgggctgaggccaatctggtgccggtgactcatgagtttcgggttcccaagggggcggagaaatctctgaaacgcccactcagtgacgtcactgacactagctataaaagtccggagaagcgggcgagggtctcatttgctccggagacgcccgactgttcggacgagaccgccgaccccgctcctccgcgaccgatcgattggacctccaggtatgattgtcgatgcgattcgcatgctcgcgtcgagactgttgatgaaatgtgtgaggaatgcgaatatctgaatcggggcaaaaacggttgtatccctcataaaatgaactattgtcaaatctgtcatgatgtacccccctggctaaaggaaaaagtgtctgatgtagtggatcttgacgatgccaataaagagcagtaaataaagcgagtagtcatgtcgtttgttgatcaccctccagattggcttgaggagattggtgagggtctaaaggagtttttgggactcgaacctggcccacccaaaccgaagcccaaccagcagaagcaagacgacgcccgtggtcttgtactgcctggatataattacctgggacccggaaacggtctcgaccgcggagaacctgtcaaccgggctgacgaggtcgcgcgagagcacgacatctcgtacaacgagcagctccaggcgggagacaacccctacctcaagtacaaccacgcggacgccgagtttcaggagaagctcgcggacgacacctccttcgggggcaacctcggcaaggcagtctttcaggccaaaaaaagggttctcgaaccttttggcctggttgaggagcctgttaagacggctgctaaaggcgagcggatagacgaccactatcccaaaaagaagaaggctcggatcgaagagaccgaagctggaaccagcggagcccagcagctgcagatcccagcccaaccagcctcaagtttgggagctgatacaatgtctgcgggaggtggcagcccactgggcgacaataaccaaggcgccgatggagtgggcaatgcctcgggagattggcattgcgattccacgtggatgggggaccgagtcatcaccaagtccacccgaacctgggtgctgcccagctacaacaaccatcagtaccttgagatccacagcggttccgtcgacggaagcaacgctaacgcttattttggatacagcaccccctgggggtactttgacttcaaccgcttccacagccactggagcccccgagactggcagcgactcgtcaacaactactggggattcagaccccggtccctcaaggtcaagatctttaacatccaagtcaaggaagtcacgacgcaggacggcaccaccaccatcgccaacaacctcacctccaccgtccaagtgtttacggacaacgactaccagctaccgtacgtcatcggcaacggaacggaggggtgcctgccggccttccctccgcaggtctttacgctgccgcagtacggctacgcgacactgaaccgtaacaacaccgacgatcccaccgagcggagcagtttcttctgcctggaatactttcccagcaagatgctgcggacgggcaacaactttgaattcacctacagcttcgaggaggtgcccttccactgcagcttcgctcccagccagaacctcttcaagctggccaatccgctggtggaccagtacctgtaccgctttgtgagcaccgacacttccggtaacctacagttccaaaagaacttgaaggccagatatgccaacacttacaagaattggtttccggggcccatgtgccggacccagggctggtacacaagcgcgggcacatataacaacaaaggcgttgccaactttgatacttcaaacaagatggaactggagggggctagttaccaagtaaaccctcaaccaaatggaatgacaaacacgcttcaggatagtaacaaatacgcgcttgaaaacaccatgatcttcaacgcacagaacgcccctccgggaacgacctctctgtaccaggagaacaatcttttgataaccagcgagagcgagacgcagcctgtgaaccgattggcctacaacaccggtggtcaggtatcaaacaacaaccagaattcaaatacacatcctacggtcggagtatacaatcaccaggaagtgttgcctggtagcgtgtggatggacagagacgtataccttcagggccccatctgggccaaaatcccggagacaggggcacactttcatccttctccggctatgggcggattcggactcaaacacccaccgcccatgatgctcatcaagaacacaccggtacctagcaacgtcgctgccttctctgacgtgcccgttaaaagcttcatcacccagtacagcaccggacaggtcacggtggagattgaatgggagctcaagaaagaaaactccaagaggtggaatcccgagatacagtacaccaacaactacaacaaccctacattcgtggactttgctccagacacctccggcgagtacaggactacgagggctattggaacccgttaccttacccgacccctgtaaccctatcctgtcacatgttttcaataaaccggttaattcgtttcagt

SEQ ID NO: 38 - DNA, 4259 bp, Adeno-associated virus
tttgcgacattttgcgacaccacgtggccattcagggtatatatggccgagtgagcgagcaggatccccattttgaccgcgaaatttgaacgagcagcagccatgccgggcttctacgagatcgtgatcaaggtgccgagcgacctggacgagcacctgccgggcatttctgactcgtttgtgaactgggtggccgagaaggaatgggagctgcccccggattctgacatggatctgaatctgattgagcaggcacccctgaccgtggccgagaagctgcagcgcgacttcctggtccaatggcgccgcgtgagtaaggccccggaggccctcttctttgttcagttcgagaagggcgagtcctacttccacctccatattctggtggagaccacgggggtcaaatccatggtgctgggccgcttcttgagtcagattagggacaagctggtgcagaccatctaccgcgggatcgagccgaccctgcccaactggttcgcggtgaccaagacgcgtaatggcgccggaggggggaacaaggtggtggacgagtgctacatccccaactacctcctgcccaagactcagcccgagctgcagtgggcgtggactaacatggaggagtatataagcgcgtgtttgaacctggccgagcgcaaacggctcgtggcgcagcacctgacccacgtcagccagacccaggagcagaacaaggagaatctgaaccccaattctgacgcgcctgtcatccggtcaaaaacctccgcgcgctacatggagctggtcgggtggctggtggaccggggcatcacctccgagaagcagtggatccaggaggaccaggcctcgtacatctccttcaacgccgcctccaactcgcggtcccagatcaaggccgctctggacaatgccggcaagatcatggcgctgaccaaatccgcgcccgactacctggtaggccccgctcctcccgcggacattaaaaccaaccgcatctaccgcatcctggagctgaacggctacgaccctgcctacgccggctccgtctttctcggctgggcccagaaacggttcgggaagcgcaacaccatctggctgtttgggccggccaccacgggcaagaccaacatcgcggaagccatcgcccacgccgtgcccttctacggctgcgtcaactggaccaatgagaactttcccttcaacgattgcgtcgacaagatggtgatctggtgggaggagggcaagatgacggccaaggtcgtggagtccgccaaggccattctcggcggcagcaaggtgcgcgtggaccaaaagtgcaagtcgtccgcccagatcgatcccacccccgtgatcgtcacctccaacaccaacatgtgcgccgtgattgacgggaacagcaccaccttcgagcaccagcagccgttgcaggaccggatgttcaaatttgaactcacccgccgtctggagcatgactttggcaaggtgacaaagcaggaagtcaaagagttcttccgctgggcgcaggatcacgtgaccgaggtggcgcatgagttctacgtcagaaagggtggagccaacaaaagacccgcccccgatgacgcggataaaagcgagcccaagcgggcctgcccctcagtcgcggatccatcgacgtcagacgcggaaggagctccggtggactttgccgacaggtaccaaaacaaatgttctcgtcacgcgggcatgcttcagatgctgtttccctgcaagacatgcgagagaatgaatcagaatttcaacatttgcttcacgcacgggaccagagactgttcagaatgtttccccggcgtgtcagaatctcaaccggtcgtcagaaaaaggacgtatcggaaactctgtgcgattcatcatctgctggggcgggctcccgagattgcttgctcggcctgcgatctggtcaacgtggacctggatgactgtgtctctgagcaataaatgacttaaaccaggtatggctgccgatggttatcttccagattggctcgaggacaacctctctgagggcattcgcgagtggtgggacttgaaacctggagccccgaaacccaaagccaaccagcaaaagcaggacgacggccggggtctggtgcttcctggctacaagtacctcggacccttcaacggactcgacaagggggagcccgtcaacgcggcggacgcagcggccctcgagcacgacaaggcctacgaccagcagctcaaagcgggtgacaatccgtacctgcggtataaccacgccgacgccgagtttcaggagcgtctgcaagaagatacgtcttttgggggcaacctcgggcgagcagtcttccaggccaagaagcgggttctcgaaccttttggtctggttgaggaaggcgctaagacggctcctggaaagaaacgtccggtagagcagtcgccacaagagccagactcctcctcgggcatcggcaagacaggccagcagcccgctaaaaagagactcaattttggtcagactggcgactcagagtcagtccccgacccacaacctctcggagaacctccagcaacccccgctgctgtgggacctactacaatggcttcaggcggtggcgcaccaatggcagacaataacgaaggcgccgacggagtgggtaatgcctcaggaaattggcattgcgattccacatggctgggcgacagagtcatcaccaccagcacccgcacctgggccttgcccacctacaataaccacctctacaagcaaatctccagtgcttcaacgggggccagcaacgacaaccactacttcggctacagcaccccctgggggtattttgatttcaacagattccactgccacttttcaccgcgtgactggcagcgactcatcaacaacaattggggattccggcccaagagactcaacttcaagctcttcaacatccaagtcaaggaggtcacgacgagtgatggcgtcacaaccatcgctaataaccttaccagcacggttcaagtcttctcggactcggagtaccagcttccgtacgtcctcggctctgcgcaccagggctgcctccctccgttcccggcggacgtgttcatgattccgcaatacggctacctgacgctcaacaatggcagccaagccgtgggacgttcatccttttactgcctggaatatttcccttctcagatgctgagaacgggcaacaactttaccttcagctacacctttgaggaagtgcctttccacagcagctacgcgcacagccagagcctggaccggctgatgaatcctctcatcgaccaatacctgtattacctgaacagaactcaaaatcagtccggaagtgcccaaaacaaggacttgctgtttagccgtgggtctccagctggcatgtctgttcagcccaaaaactggctacctggaccctgttatcggcagcagcgcgtttctaaaacaaaaacaggcaacaacaacagcaattttacctggactggtgcttcaaaatataacctcaatgggcatgaatccatcatcaaccctggcactgctatggcctcacacaaagacgacgaagacaagttctttcccatgagcggtgtcatgatttttggaaaagagagcgccggagcttcaaacactgcattggacaatgtcatgattacagacgaagaggaaattaaagccactaaccctgtggccaccgaaagatttgggaccgtggcagtcaatttccagagcagcagcacacaccctgcgaccggagatgtgcatgttatgggagcattacctggcatggtgtggcaagatagagacgtgtacctgcagggtcccatctgggccaaaattcctcacacagatggacactttcacccgtctcctcttatgggcggctttggactcaagcacccgcctcctcagatcctcatcaaaaacacgcctgttcctgcgaatcctccggcggagttttcagctacaaagtttgcttcattcatcacccaatactccacaggacaagtgagtgtggaaattgaatgggagctgcagaaagaaaacagcaagcgctggaatcccgaagtgcagtacacatccaattatgcaaaatctgccaacgttgattttaccgtggacaacaatggactttatactgagcctcgccccattggcacccgttaccttacccgtcccctgtaattacgtgttaatcaataaaccggttgattcgtttcagttgaactttggtctcctgtcc

SEQ ID NO: 39 - DNA, 4222 bp, Adeno-associated virus
ttgcgacattttgcgacaccatgtggccattcagggtatatatggccgagtgagcgagcaggatctccattttgaccgcgaaatttgaacgagcagcagccatgccgggcttctacgagatcgtgatcaaggtgccgagcgacctggacgagcacctgccgggcatttctgactcgtttgtgaactgggtggccgagaaggaatgggagctgcccccggattctgacatggatctgaatctgattgagcaggcacccctgaccgtggccgagaagctgcagcgcgacttcctggtccaatggcgccgcgtgagtaaggccccggaggccctcttctttgttcagttcgagaagggcgagtcctacttccacctccatattctggtggagaccacgggggtcaaatccatggtgctgggccgcttcctgagtcagattagggacaagctggtgcagaccatctaccgcgggatcgagccgaccctgcccaactggttcgcggtgaccaagacgcgtaatggcgccggaggggggaacaaggtggtggacgagtgctacatccccaactacctcctgcccaagactcagcccgagctgcagtgggcgtggactaacatggaggagtatataagcgcgtgtttgaacctggccgagcgcaaacggctcgtggcgcagcacctgacccacgtcagccagacccaggagcagaacaaggagaatctgaacccgaattctgacgcgcctgtcatccggtcaaaaacctccgcgcgctacatggagctggtcgggtggctggtggaccggggcatcacctccgagaagcagtggatccaggaggaccaggcctcgtacatctccttcaacgccgcctccaactcgcggtcccagatcaaggccgctctggacaatgccggcaagatcatggcgctaaccaaatccgcgcccgactacctggtaggccccgctccgcccgcggacattaaaaccaaccgcatttaccgcatcctggagctgaacggctacgaccctgcctacgccggctccgtctttctcggctgggcccagaaaaggttcgggaagcgcaacaccatctggctgtttgggccggccaccacgggcaagaccaacatcgcggaagccatcgcacacgccgtgcccttctacggctgcgtcaactggaccaatgaaaactttcccttcaacgactgcgtcgacaagatggtgatctggtgggaggagggcaagatgacggccaaggtcgtggagtccgccaaggccattctcggcggcagcaaggtgcgcgtggaccaaaagtgcaagtcgtccgcccagatcgatcccacccccgtgatcgtcacctccaacaccaacatgtgcgccgtgattgacgggaacagcaccaccttcgagcaccagcagccgttgcaggaccggatgttcaaatttgaactcacccgccgtctggagcacgactttggcaaggtgacaaagcaggaagtcaaagagttcttccgctgggcgcaggatcacgtgaccgaggtggcgcatgagttctacgtcagaaagggtggagccaacaagagacccgcccccgatgacgcggataaaagcgagcccaagcgggtctgcccctcagtcgcggatccatcgacgtcagacgcggaaggagctccggtggactttgccgacaggtaccaaaacaaatgttctcgtcacgcgggcatgcttcagatgctgtttccctgcaaaacatgcgagagaatgaatcagaatttcaacatttgcttcacgcacgggaccagagactgttcagaatgtttccccggcgtgtcagaatctcaaccggtcgtcagaaaaaggacgtatcggaaactctgtgccattcatcatctgctggggcgggctcccgagattgcttgctcggcctgcgatctggtcaacgtggacctggatgactgtgtttctgagcaataaatgacttaaaccaggtatggctgccgatggttatcttccagattggctcgaggacaacctctctgagggcattcgcgagtggtgggacttgaaacctggagccccgaaacccaaagccaaccagcaaaagcaggacgacggccggggtctggtgcttcctggctacaagtacctcggacccttcaacggactcgacaagggggagcccgtcaacgcggcggacgcagcggccctcgagcacgacaaggcctacgaccagcagctcaaagcgggtgacaatccgtacctgcggtataaccacgccgacgccgagtttcaggagcgtctgcaagaagatacgtcttttgggggcaacctcgggcgagcagtcttccaggccaagaagagggttctcgaaccttttggtctggttgaggaaggtgctaagacggctcctggaaagaaacgtccggtagagcagtcaccccaagaaccagactcctcctcgggcattggcaaatcaggccagcagcccgctaaaaagagactcaattttggtcagactggcgactcagagtcagtccccgacccacaacctctcggagaacctccagcaacccccgctgctttgggacctactacaatggcttcaggcggtggcgcaccaatggcagacaataacgaaggcgccgacggagtgggtaatgcctcaggaaattggcattgcgattccacatggctgggcgacagagtcatcaccaccagcacccgcacctgggccttgcccacctacaataaccacctctacaagcaaatctccagtgcttcaacgggggccagcaacgacaaccactacttcggctacagcaccccctgggggtattttgatttcaacagattccactgccatttctcaccacgtgactggcagcgactcatcaacaacaactggggattccggcccaagagactcaacttcaagctcttcaacatccaagtcaaggaggtcacgacgaacgatggcgtcacgaccatcgctaataaccttaccagcacggttcaagtcttctcggactcggagtaccagcttccgtacgtcctcggctctgcgcaccagggctgcctccctccgttcccggcggacgtgttcatgattccgcagtacggctacctgacgctcaacaatggcagcaaagccgtgggacgttcatccttttactgcctggaatatttcccttctcagatgctgagaacgggcaacaactttaccttcagctacacctttgaggaagtgcctttccacagcagctacgcgcacagccagagcctggaccggctgatgaatcctctcatcgaccaatacctgtattacctgaacagaactcaaaatcagtccggaagtgcccaaaacaaggacttgctgtttagccgtgggtctccagctggcatgtctgttcagcccaaaaactggctacctggaccctgttatcggcagcagcgcgtttctaaaacaaaaacagacaacaacaacagcaattttacctggactggtgcttcaaaatataacctcaatgggcgtgaatccatcatcaaccctggcactgctatggcctcacacaaagacgacgaagacaagttctttcccatgagcggtgtcatgatttttggaaaagagagcgccggagcttcaaacactgcattggacaatgtcatgattacagacgaagaggaaattaaagccactaaccctgtggccaccgaaagatttgggaccgtggcagtcaatttccagagcagcagcacagaccctgcgaccggagatgtgcatgttatgggagcattacctggcatggtgtggcaagatagagacgtgtacctgcagggtcccatttgggccaaaattcctcacacggatggacactttcacccgtctcctcttatgggcggctttggactcaagcacccgcctcctcagatcctcatcaaaaacacacctgttcctgcgaatcctccggcagagttttcggctacaaagtttgcttcattcatcacccagtactccacaggacaagtgagcgtggaaattgaatgggagttgcagaaagaaaacagtaagcgctggaatcccgaagtgcagtacacatctaattatgcaaaatctgccaacgttgacttcactgtggacaacaatggactttatactgagcctcgccccattggcacccgttacctcacccgtcccctgtaattacttgttaatcaataaaccg

SEQ ID NO: 40 - DNA, 4684 bp, Avian adeno-associated virus
tggccagtttccaaaacaggctcgctcgctcactcggggcgcgacgccaaaggcgtcgcagcgaccccttcggggtcgcgccccgagtgagcgagcgagcctgttttggaaactggccagcactccggtgaggtaatgccgtcacgtggtaccgcacgtgaataggaaatctcgcgagaacgtaaacaaatataagacgacgccacgccgcgccgcgtcatacgcgcgcgcgcaccggcgagatgaggtcgtactacgaggtcatcgttcagctgcccaacgacgtcgagagtcaggtacctggaatctcggattcgttcgtcaactggattacgtcgcgagaatggacgttgcctgaggacgccgattgggatttggaccaggtcgatcaagttcaactgacgctcggcgacaaaatccaacgggagattcgaaatcattgggggacaatggccaaagaaccggactttcactattttatccaactcgaacaaggtgaggtgttctttcatttgcacgtcctgctggaaacgtgttccgtcaagccgatggtgctcgggcgatacattcggcatattcagcaaaagatcgtgagtaaagtctactgcggacacgaacccgcgatggaaggatggatgcgtgtgaccaaaaccaagaattttgggggcgcgaacaaggttcgggccgaatcatatattcccgcctacctgattccgaaacagcaaccggaagtgcagtgggcgtggactaacgtgcccgagtatataaaagcgtgcctgcaccgagaactgcgtgccagtctcgcgcgacttcacttcgaggaggcggggctctcgcagtccaaggaaaatctcgcgagaactgcagacggcgctcccgtgatcgcgacccgcgtcagcaaacgctacatggagctcgtggattggctcgtggagaaggggatcaccaccgagaaggaatggctgctggaaaacagagaaagctttcggagctttcaagcctcgagcaactcggcgcgtcagatcaagacggctctacaaggcgccattcaggagatgcttctgaccaagacggcggaggactacctcgtcggaaaggatcccgtctcggacgacgagattcgtcagaatcgcatctacaagatcctggaactgaaccactacgacccggcgtatgtggggagtattttggtcgggtggtgccagaagaaatggggcaagcgaaacacgctgtggctgttcggacctgcgaccaccggcaagaccaacatcgcggaggctattgcccatgctgtgccgttctatggatgcgttaactggaccaacgagaactttccgttcaacgactgcgtcgaaaagatgattatctggtgggaggagggcaaaatgaccgccaaagtggtggaaacggccaaggcgattctggggggatctcgggtgagagtggatcaaaaatgcaaagcttcggttcctattgaaccgacgtcggtcattattaccagtaacaccaacatgtgttatgtcatcgacgggaacacgactacgttcgagcataagcagccgttggaggacaggatgtttaagctcgagctgttgactcgtttacccgatgactttggtaaggtgaccaaacaggaggtgcgtcaattcttcaggtggtcccaggatcacctgacgcccgtgatcccagaattcctggtgcggaaggcggagtctcgcaaaagacccgccccttccggggaaggctatataagcccgaccaagaagcccgcgctcgcagagcagcagcaggcgtcggagagcgcggagccggttcccaccaggtatcgtatcaaatgctcgaaacattgcgggatggataaaatgttgtttccttgccaaatttgtgaatcgatgaacagaaatattaatatatgtgcgattcataaaacaacggaatgtaaagaatgttttccggaatacggggataaaaaggacactgtaccagaactacccccctgtacagaacataacgtgtctcgttgttatcaatgtcattcgggcgaattgtatcgcgtgacttcggactctgacgagaaacctgcccccgcgagtgatgaaggcactgagccatcctatgctccctgcacgattcaccacttgatgggcaagagtcgcgggttagtgtcgtgtgctgcatgtcggttaaaaaatagtacattgcatgatgacttggacgatggcgatctcgaacaataaatgattgaaatatagccatgtctcttatttctgatgcgattccagattggttggagcggttggttcgcaagggagtcaacgctgcggctgacttttatcatttggagagcggtcctcctgctcctaaggccaatcagcaaactcaagaatctcctgaaaaggacgattctagaggtctcgtgttcccgggttacaagtatctaggcccttttaacggtctagataaaggagaacccgtcaacgaggcagacgctgccgccttagagcacgacaaggcttacgacctcgaactcaaggacgggcacaacccgtactttgagtacaacgaggccgatagacgtttccaggaacgtctcaaagacgatacctctttcggggggaatctcggtaaagctatctttcaggccaaaaagagggtcctcgagccctttggtctgattgaacaacccgacaacacggccgggaccggggagaagcgtcccgaacgcgtcgacgactttttcccgaaaaagaagaaggccaagaccgagcaaggcaaaacccctgctcaaacgggcgaagaccccggagaaggaacctcttccaacgctggatcaagcgccccctctagtgtgggatcatctgtcatggctgaaggaggtggcggcccagtgggcgatgcaggccagggtgccgatggagtgggcaattcctcgggaaattggcattgcgattcccaatggctggacaacggagtcgtcactcgaaccacccgaacctgggtcttgcccagctacaacaaccacctgtacaagcggatccaaggaccgggaggaaccgacaacaacaacaaatactttggattcagcaccccctgggggtactttgactacaaccgattccactgccacttttctccgcgagactggcaaagactcatcaacaacaactggggcatccgacccaaagcgatgcgctttagactctttaacatccaggtcaaagaagtcacggtccaagactccaacaccaccattgccaacaacctcaccagcacggtccaagtctttgcggacaaggactaccagctgccgtacgtcctcggatcggctaccgaaggcaccttcccgccgttcccagcggatatctacacgatcccgcagtatggttactgcacgctaaactacaacaacgaggcggtggatcgttcggccttctactgtctggactactttccctcagacatgctgcggacaggaaataactttgaattcacttacacgttcgaggacgttcctttccatagcatgtttgcccacaaccagacgctagaccggctgatgaatcccctcgtcgatcagtacctctgggccttcagctccgtcagccaacccagctcgggtcagagacggctcaattattccagaggcactaaaaacaatatggcggtccaatacaagaactggttacccggacccttcttcagggatcagcaaatctatacaggggctagcaacatcacccaaaacaacgtttttaacgtttgggacaaaggcaagcagtgggtgatagacaatcggaccaacctaatgcagcccggccctgctgcagcgaccacctttagcggagaacccgaccgtcaagccatgcaaaacacgctggcttttagtcggacggtctacgaccagacaactagtacggccgatcgtaaccagttgctcattaccaacgaagatgaaatcagacccaccaactcggtcggtattgacgtgtggggagtagttcccaacaaccaacagtccaacgtgtcccctggaaatcgcacaggtgtcaacaaccaaggggcgcttcccgggatggtgtggcaaaacagagacatttacctccaaggacccatttgggccaaagtccccgacaccgacaatcacttccacccgtctcctcttattggcggattcgggtgcaagcaccctcctccccaaattttcattaaaaatacccctgtccctgccaaccctccggaaacgttccagacggccaaggtggcctccttcatcaaccagtactcgaccggacagtgcaccgtcgaaatcttttgggaactgaagaaggaaacctccaaacgctggaaccccgaaatccagttcacctccaactttggcaacgcggccgacatccagttctccgtctccgacaccggactctattccgaacctcgtcccatcggtacccgttacctcaccaaaccgctgtaaatttaaacccttcaataaaccgtttatgcgtaactgtacttccgtctcctgtcgttattcggtcacatgatgcggcattacctcaccggagtgctggccagtttccaaaacaggctcgctcgctcactcggggcgcgacgccaaaggcgtcgcagcgaccccttcggggtcgcgccccgagtgagcgagcgagcctgttttggaaactggcca

SEQ ID NO: 41 - DNA, 4682 bp, Avian adeno-associated virus
tggccagtttccaaaacaggctcgctcgctcactcgggccgcgacgccaaaggcgtcgctaccggcgccttcggggccgcggcccgagtgagcgagcgagcctgttttggaaactggccagcactccggtgaggtaatgccgtcacgtggtcgggaacgggaacgggaaatctcgcgagaacgtaaacagatataagacggcgccacacggcgctgcgtcatacgcgcgcgcgcaccggcgagatgaggtcgtactacgaggtcatcgttcagctgccgaacgacgtcgagagtcagatacctggaatctccgattcgttcgtcaactggattacgtcgcgagaatggacgttgccggaagacgccgattgggatttggaccaggtcgatcaagttcagctgacgctgggagacaaaatccaacgggagattcgaaatcattgggggacgatggccaaagaacccgactttcactattttatccaactggaacaaggtgaggtgttctttcatttgcacgtcctgctggaaacgtgttccgtcaagccgatggtgctcggaagatatattcgacatattcaacaaaaaattgtgagtaaagtctactgcggccacgagcccgcgatggaaggatggatgcgggtgaccaagaccaaaaattttgggggcgcgaacaaggtccgggccgagtcgtatattcccgcctacctgatcccgaaacagcaaccggaagtgcagtgggcgtggactaacgtgcccgagtatataaaagcgtgcctgcaccgagacctgcgtgccagtctcgcgcgacttcacttcgaggaggcggggctctcgcagtccaaggaaaatctcgcgagaactgcagacggcgctcccgtgatcgcgacccgcgtcagcaaacgctacatggagctcgtagattggctcgtggagaaggggatcaccaccgagaaggaatggctgctagaaaacagagaaagctttcggagctttcaggcctcgagcaactcggcgcgtcagatcaagacggccctgcaaggcgccattcaggagatgctactgaccaagacggcggaggactacctcgtcggaaaggatcccgtctcggacgacgacattcgtcagaaccgcatctacaagattttggaactgaaccactacgacccggcgtacgtggggagtattttggtcgggtggtgccagcggaaatggggcaagcgaaacacgctgtggctgttcggacctgcgaccaccggcaagaccaacatcgcggaggctattgcccatgctgtaccgttctatggatgcgttaactggactaacgagaactttccgttcaacgactgcgtcgaaaagatgattatctggtgggaggagggcaaaatgaccgccaaggtggtggaaacggctaaagccatcctggggggatcacgggtacgggtggatcagaaatgtaaggcctcggttccgatcgaaccaactcctgtcatcatcaccagcaacaccaacatgtgctatgtcatcgacgggaacacgaccacgttcgagcataagcagccgttggaggacaggatgtttaagctcgaattgctgactcggttgcccgatgaatttggcaaggtgtcaaaacaggaggtgcgccaatttttcaggtggtcccaggatcacctgatgcccgtaatcccagaattccttgtgcggaaggcggagtctcgcaaaagacccgccccttccggggaaggctatataagcccgtcaaagaagcccgcgctcgcagagcagcagcaggcgtcggagagcgcggacccggttcccaccaggtatcgtatcaaatgctcgaaacattgcgggatggataaaatgttgtttccttgtcaaatttgcgaatcgatgaatagaaatatcaacatttgtgcgattcataagacaaccgaatgtaaagaatgttttccggaatacggggataaggacactgtaccagaactacccccctgtacagaacataacgtgtctcgttgttatcaatgtcactcgggtgaactgtatcacgtgactgcggactctgacgagaaatcggcccccgagatcgatgactgcatcgagccgacctatgctccctgcacgattcattacatgatgggcaagagtcgcgggttagtgtcttgtgccgcgtgtcgtttgaaaaatagtacattgcacgatgacttggatgacggtgatctcgaacaataaatgattgaaatatagccatgtctcttatttctgatgcgattccagattggttggagcgattggttcgcaagggagtgaatgctgcagctgatttctaccatttggaaagcggtcctcctgctcctaaggcaaatcagcaaactcaagaatctcctgaaaaggacgattcgcgaggtctcgtgttcccgggttacaagtatctaggccctttcaacggtctagataaaggagaacccgtcaacgaggcagacgctgccgccttagagcacgacaaggcttacgacctcgagatcaaagacgggcacaacccgtactttgagtacaacgaggccgacagacgtttccaggaacgtctgaaagacgatacctctttcggagggaatctcggtaaagcgatctttcaggccaaaaagagggtgctcgagccctttggtctgattgaacaacccgacaacacggccgggaccggggaaaagcgtcccgaacgcgtcgacgactttttcccgaaaaagaagaaggccaagaccgagcaaggcaaagcccctgctcaaacgggcgaagaccccggagaaggaacctcttccaacgctggatcaagcgccccctctagtgtgggatcatctgtcatggctgaaggaggtggcggtccaatgggcgatgcaggccaaggtgccgacggagtgggcaattcctcgggaaattggcattgcgattcccaatggctggacaacggagtcgttacccgaaccactcgaacctgggtcctgcccagctacaacaaccacttgtacaagcggatccaaggaccgggaggaaccgaccccaacaataaatactttggattcagcaccccctggggatactttgattacaaccgattccactgccacttttctccgcgagactggcaacgactcatcaacaacaactggggcatccgtcccaaagcgatgcgctttagactctttaacatccaggtcaaagaagtcacggtccaagactccaacaccaccatcgccaacaacctcaccagcacggtccaagtctttgcggacaaggactatcagctgccgtacgtcctcggatcggctacagagggcaccttcccgccgttcccagcggatatctacacgatcccgcagtacggttactgcacactaaactacaacaacgaggcggtggatcgttcggccttctactgtctggactatttcccctcagacatgctgcggacaggaaataactttgagttcacttacacgttcgaggacgttcctttccatagcatgtttgcccacaaccagacgctagaccggctgatgaatcccctcgtcgatcagtacctgtgggccttcagctccgccactcaggcgggatcctctggacggaagctcaattattccagaggcactaaaaccaatatggcggtccaatacaagaactggttacctggacccttcgtccgggatcagcaaatctttacgggggctagcaacatcaaccaaaacaacgtgttcaacgcttgggataaaagcaagcagtgggtgatagacaatcgggtcaatatgatgcagcccggccctgcagcagcgaccagctttagcggagaacccgaccgtcaagccatgcaaaacacgctggcctttagtcggacggtctacgaccagacatccagtacggccgatcgtaaccagttgctcattaccaacgaagatgaaatcagacccaccaacccggtcggcatcgacacgtggggagtagttcccaacaacaaccagtccaacgtgtccgccggcactcgcgcggccatcaacaaccaaggggcgcttcccgggatggtgtggcaaaacagagacatttacctccaaggacccatttgggccaaaatccccgacacagacaatcatttccacccatctcctcttattggcggattcgggtgcaagcaccctcctcctcaaattttcattaaaaatacccctgtccctgccaacccttcggaaacgttccagacggccaaggtggcctccttcatcaaccaatactcgaccggacagtgcaccgtcgaaatcttttgggaactgaagaaggaaacttccaaacgctggaaccccgaaatccagttcacctccaatttcggcaacgcggccgacatccagtttgccgtctccgacaccggatcctactccgaacctcgtcccatcggtacccgttaccttaccaaacctctgtaaattaaacccttcaataaaccgtttatgcgtaactgtatttccgtctcctgtcgttattcagtcacatgatgcggcattacctcaccggagtgctggccagtttccaaaacaggctcgctcgctcactcgggccgcgacgccaaaggcgtcgctaccggccccttcggggccggggcccgagtgagcgagcgagcctgttttggaaactggcca

SEQ ID NO: 42 - DNA, 4694 bp, Avian adeno-associated virus
tggccagtttccaagacaggctcgctcgctcactcgggccggggccccaaaggggcccctagcgaccgcttcgcggtcgcggcccgagtgagcgagcgagcctgtcttggaaactggccagcactccggtgaggtaatgccgtcacgtggtcgggaatgggaacgggaaatctcgcgagaacgtaaacaaatataagacggcgccacacggcgctgcgtcatacgcgcgcgcgcaccggcgagatgaggtcgtactacgaggtcatcgttcagctgcccaacgacgtcgagagtcaggtacctggaatctccgattcgttcgtcaactggattacgtcgcgagaatggacgttgcctgaggacgccgattgggatttggaccaggtcgatcaagttcaactgacgctcggcgacaaaatccaacgggagattcgaactcattgggggacgatggccaaagaaccggactttcactattttatccaactggaacaaggtgaggtgttctttcatttacacgtcctgctggaaacgtgttccgtaaagccgatggtactcggaagatatatccgacatattcaacaaaaaattgtgagtaaagtctactgcgccacgagcctacgatggaaggatggatgcgtggtgaccaagaccaaaaatttcgggggcgcgaacaaggtccgggccgagtcgtatattcccgcctacctgatcccgaaacagcaaccggaagtgcagtgggcgtggactaacgtgcccgagtatataaaagcgtgcttgcaccgagaactgcgtgccagtctcgcgcgacttcacttcgaggaggcgggcgtctcgcaatccaaggaaaatctcgcgagaactgcagacggcgctcccgtgatgccgacccgcgtcagcaaacgctacatggagctcgtggattggctcgtggagaaggggatcaccaccgagaaggaatggctgctggaaaacagagaaagctttcggagctttcaggcctcgagcaactcggcgcgtcagatcaagacggccctgcaaggcgccattcaggagatgcttctgaccaagacggcggaggactacctcgtcggaaaggatcccgtctcggacgacgacatccgtcagaaccgcatctacaagattctggaactgaaccactacgacccagcgtacgtggggagtattttggtcgggtggtgccagaagaaatggggcaagcgaaacacgctgtggctgttcggacatgcgaccaccggcaagaccaacatcgcggaggctattgcccatgctgtgccgttctatggatgcgttaactggaccaacgagaactttccgttcaacgactgcgtcgaaaaaatgattatctggtgggaggagggcaaaatgaccgccaaagtggtggaaacagccaaggcgattctgggaggatctcgggtgagagtggaccaaaaatgcaaagcttcggttccgatcgaaccgacgccggtcattattaccagtaacaccaacatgtgttatgtcatcgacgggaacacgaccacgttcgagcataagcagccgttggaggacaggatgtttaagctcgaattgctgactcggttgcctgatgactttggtaaggtgaccaaacaggaggtgcgtcaattcttcaggtggtctcaggatcacctgacccctgtgatcccagaattcctagtgcggaaggcggagtctcgcaaaagacccgccccttccggggaaggctatataagcccgacaaagcggcccgcgctcgcagagcagcagcaggcgtcggagagcgcggacccggttcccaccaggtatcgtatcaaatgctcgaaacattgcggtatggataaaatgttgtttccttgccaaatttgtgaatcgatgaacagagatattaatatttgtgctattcataaaacgaccgactgtaaagagtgtttccccgactacggggataaagatgatgtagaactacccccctgtacagaacacaacgtgtctcgttgttatcaatgtcattcgggcgaattgtatcgcgtgacttcggactctgacgagaaacctgcccccgagagtgatgaaggcaccgagccatcctatgctccctgcacgattcaccacctgatgggcaagagtcacgggttagtcacttgcgcggcgtgtcggttgaaaaatagtacgttgcatgatgacttggatgacggtgatctcgaacaataaatgattgaaatgtagccatgtctctcatttctgatgcgattccagattggttggagcggttggtcaaaaagggagtgaatgctgcagctgatttctaccatttggaaagcggtcctcctcgtcctaaggcaaatcagcaaactcaagaatctcttgaaaaggacgattcgagaggtctcgtgttcccaggctacaattatctaggccctttcaacggtctagataaaggagaacccgtcaacgaggcagacgctgccgccttagaacacgacaaggcttacgacctcgaaatcaaggacgggcacaacccgtactttgagtacaacgaggccgacagacgtttccaggaacgtctcaaagacgatacctcctttggaggcaatttaggtaaagccatcttccaggccaaaaagagggttctcgaaccctttggtctggtggaagactcaaagacggctccgaccggagacaagcggaaaggcgaagacgaacctcgtttgcccgacacttcttcacagactcccaagaaaaacaagaagcctcgcaaggaaagaccttccggcggggcagaagatccgggcgaaggcacctcttccaacgctggagcagcagcacccgcctctagtgtgggatcatctatcatggctgaaggaggtggcggcccagtgggcgatgcaggccagggtgccgatggagtgggcaattcctccggaaattggcattgcgattcccaatggctggaaaacggagtcgtcactcgaaccacccgaacctgggtcttgcccagctacaacaaccacctgtacaaacgaatccaaggacccagcggaggcgacaacaacaacaaattctttggattcagcaccccctggggatactttgactacaatcgattccactgccacttttccccgcgagactggcaacgactcatcaacaacaactggggcatccgtcccaaagcgatgcgctttagactctttaacatccaggttaaagaggtcacggtccaagacttcaacaccaccatcggcaacaacctcaccagtacggtccaggtctttgcggacaaggactaccaactgccgtacgtcctcggatcggctaccgaaggcaccttcccgccgttcccagcggatatctacacgatcccgcagtacgggtactgcacgctaaactacaacaacgaggcggtggatcgttcggccttctactgtctggactactttccctcagacatgctgcggacaggaaataactttgagtttacttacaccttcgaggacgttcctttccatagcatgtttgcccacaaccagacgctagaccggctgatgaatcccctcgtggatcagtacctctgggctttcagctccgtcagccaagcaggctcatctggacgagctcttcattactcgcgggcgactaaaaccaacatggcggctcaatataggaactggttacctgggcctttcttccgtgatcagcaaatctttacgggcgctagcaacatcactaaaaataacgtctttagcgtttgggaaaaaggcaagcaatgggaactcgacaatcggaccaacctaatgcagcccggtcctgcggcagcgaccacctttagcggagaacctgaccgtcaagccatgcaaaacacgctggcttttagcaggaccgtctacgatcaaacgaccgccacgaccgatcgtaaccagatactcatcaccaacgaagacgaaatcagacccaccaactcggtcggtatcgacgcgtggggagcagttcccaccaacaaccagtcgatcgtgacccccggcactcgcgcggccgtcaacaatcaaggggcgcttcccgggatggtgtggcaaaacagagacatttaccctacagggacccatttggccaaaattcccgacactgacaatcacttccatccgtccccgcttattgggcggtttggctgcaagcatccccctccccagattttcattaaaaacacacccgtccctgccaacccttcggaaacgttccagacggccaaagtggcctccttcatcaaccagtactcgaccggacagtgcaccgtcgaaatcttttgggaactcaagaaggaaacctccaagcgctggaaccccgaaatccagttcacctccaactttggcaacgcggccgacatccagtttgccgtctccgacacgggatcctattccgaacctcgtcccatcggtacccgttaccttaccaaacctctgtaaattaaacccttcaataaaccgtttatgcgtaactgtatttccgtctcctgtcgttattcagtcacatgatgcggcattacctcaccggagtgctggccagtttccaagacaggctcgctcgctcactcgggccggggccccaaaggggcccctagcgaccgcttcgcggtcgcggcccgagtgagcgagcgagcctgtcttggaaactggcca

SEQ ID NO: 43 - DNA, 4682 bp, Avian adeno-associated virus
tggccagtttccaaaacaggctcgctcgctcactcgggccccggccccaagggggccggtagcgacgcctttggcgtcgcggcccgagtgagcgagcgagcctgttttggaaactggccagcactccggtgaggtaatgccgtcacgtggtcgggaacgggaacgggaaatctcgcgagaacgtaaacaaatataagacgacgccacacggcgctgcgtcatacgcgcgcgcgcaccggcgagatgaggtcgtactacgaggtcatcgttcaactgccgaacgacgtcgagagtcaggtacctggaatctccgattcattcgtcaactggattacgtcgcgagaatggacgttgccggaagacgccgattgggatttggaccaggtcgatcaagttcaactgacgctcggcgacaaaatccaacgggagattcgaaatcactgggggacgatggcgaaagaaccggactttcactattttatccaactggaacaaggtgaggtgttctttcatttgcacgtcctgctggaaacgtgttccgtgaagccgatggtactcggaagatatattcgacatattcaacaaaaaattgtcagtaaagtctactgcggccacgagcccgcgatggaaggatggatgcgggtgaccaagaccaaaaatttcgggggcgcgaacaaggtccgggccgagtcgtatattcccgcctacctgattccgaaacagcaaccggaagtgcagtgggcgtggactaacgtgcccgagtatataaaagcgtgcctgcaccgagaactgcgtgccagtctcgcgcgacttcacttcgaggaggcggggctctcgcaatccaaggaaaatctcgcgagaactgcagacggcgctcccgtgatcgcgacccgcgtcagcaaacgctacatggagctcgtggattggctcgtggagaaggggatcaccaccgagaaggaatggctgctggaaaacagagaaagctttcggagcttccaggcctcgagcaactcggcgcgtcagatcaagacggccctgcaaggcgccatccaggagatgcttctgaccaagacggcggaggactacctcgtcggaaaagaacccgtctcggacgacgagattcgtcagaaccgcatctacaagattttggaactgaaccactacgacccagcgtacgtggggagtattttggtcgggtggtgccagaagaaatggggcaagcgaaacacgctgtggctgttcggacctgcgaccaccggcaagaccaacatcgcggaggctattgcccatgctgtgccgttctatggatgcgttaactggaccaacgagaactttccgttcaacgactgcgtcgaaaagatgattatctggtgggaagagggcaaaatgaccgccaaggtggtggaaacggctaaagcgattctgggaggatctcgggtgagagtggaccaaaaatgcaaagcttcggttccgatcgaaccgacgccggtcattattaccagtaacaccaacatgtgttatgtcatcgacgggaacacgactacgttcgagcataagcagccgttggaggacaggatgtttaagctcgagctgttgactcgtttacccgatgactttggtaaggtgaccaaacaggaggtgcgtcaattcttcaggtggtcccaggatcacctgacccctgtgatcccagaattcctggtgcggaaggcggagtctcgcaaaagacccgccccctccggggaaggctatataagcccgacaaagcggcccgcgctcgcagagcagcagcaggcgtcggagagcgcggagccggttcccaccaggtatcgtatcaaatgctcgaaacattgcgggatggataaaatgttgtttccttgccaaatttgtgaatcgatgaacagaaatattaatatatgtgcgattcataaaacaacggaatgtaaagaatgttttccggaatacggggataaggacactgtgccagaactacccccctgtacagaacataacgtgtctcgttgttatcaatgtcattcgggcgaattgtatcgcgtgacttcggactctgacgagaaacccgcccccgagagtgatgaaggcactgagccatcctatgctccctgcacgattcaccatttgatgggcaagagtcgcgggttagtgtcgtgtgctgcatgtcgtttgaaaaatagtacgttgcatgatgacttggatgacggtgatcttgaacaataaatgattgaaatatagccatgtctctcatttctgatgcgattccagattggttggagcggttggtcaaaaagggagtgaatgctgcggctgatttctaccatttggaaagcggtcctcctcatcctaaggcaaatcagcaaactcaagaatctcctgaaaaggacgattcgagaggtctcgtgttcccgggttacaagtatctaggccctttcaacggtctagataaaggaaaacccgtcaacgaggcagacgctgccgccttagagcacgacaaggcttacgacctcgaactcaaggacgggcacaacccgtactttgagtacaacgaggccgatagacgtttccaggaacgtctcaaagacgatacctctttcggagggaatctcggtaaagccatctttcaggccaaaaagagggtcctcgagccctttggtctgattgaacaacccgacaacacggccgggaccggggagaagcgtcccgaacgcgtcgacgactttttcccgaaaaagaagaaggccaagaccgagcaaggcaaagcccctgctcaaacgggcgaagaccccggagaaggaacctcttccaacgctggatcaagcgccccctctagtgtgggatcatctgtcatggctgaaggaggtggcggtccaatgggcgatgcaggccaaggtgccgacggagtgggcaattcctcgggaaattggcattgcgattcccaatggctggacaacggagtcgttacccgaaccactcgaacctgggtcctgcccagctacaacaaccacttgtacaagcggatccaaggaccgggaggaaccgaccccaacaataaattctttggattcagcaccccctgggggtactttgactacaaccgattccactgccacttctccccccgagactggcaacgactcatcaacaacaactggggcatccgacccaaagcgatgcgctttagactctttaacatccaggttaaagaagtcactgtccaagactccaacaccaccatcgccaacaacctcaccagcacggtccaagtctttgcggacaaggactaccagctgccgtacgtcctcggatcggctacagagggcaccttcccgccgttcccagcggatatctacacgatcccgcagtatggttactgcacgctaaactacaacaacgaggcggtggatcgttcggccttctactgtctagactatttcccctcagacatgctgcggacaggaaataactttgaattcacttacacgttcgaggacgttcctttccatagcatgtttgctcacaaccagacgctagaccggctgatgaatcctctcgtcgatcagtacctgtgggctttcagttccgtcagccaaacaggctcgtctggacgggcactcaattattcacgcgcgaccaaaaccaatatggcaacccagtacagaaactggttacctggacccttcgtccgggatcagcaaatctttacgggggctagcaacatcacccaaaacaacgtgttcaacgtttgggataaaggcaagcagtgggtgatagacaatcggatcaatatgatgcagcccggccctgcagcagcgaccacctttagcggagaacccgaccgtcaagccatgcaaaacacgctggcctttagtcggacggtctacgaccagacaaccagtacgaccgatcgtaaccagttgctcattaccaacgaagatgaaatcagacccaccaactcggtcggcatcgacacgtggggagtagttcccaacaacaaccagtccaaggtgaccgccggcactcgcgcggccatcaacaaccaaggggcgcttcccgggatggtgtggcaaaacagagacatttacctccaaggacccatttgggccaaaatccccgacacagacaatcacttccatccgtccccgcttattggcgggtttggctgcaagcatccccctccccagattttcattaaaaacacacccgtcccggccaacccttcggaaacgttccagacggccaaggtggcctccttcatcaaccagtactcgaccggacagtgcaccgtcgaaatcttttgggaactcaagaaggaaacctccaagcgctggaaccccgaaatccagttcacctccaactttggcaacgcggccgacatccagtttgctgtctccgacaccggatcctattccgaacctcgtcccatcggtacccggtaccttaccaaacctctgtaaattaaacccttcaataaaccgtttatgcgtaactgtacttccgtctcctgtcgttattcagtcacatgatacggcattacctcaccggagtgctggccagtttccaaaacaggctcgctcgctcactcgggccgcgacgccaaaggcgtcgctaccggcccccttggggccggggcccgagtgagcgagcgagcctgttttggaaactggcca

SEQ ID NO: 44 - DNA, 4286 bp, Bat adeno-associated virus
aagaaacctctaatcatcatctgtactttgtgagggtgtggtcgtgagaacgggcatgcccgggcatgtcctgttaatcattaaccagaatggactttggacttaataagttacgtattaatgggtgtgtatataagtaagtgtatttccggactcactcattcgacttccggcggtcgaggagcgaagacgcgaagccatggagttctacagcatcgttctccgcctgcccggcgactttgactcggaggtgccgggcctgcaggacagcttctacaagtggatatccgggccccggcgggagctgccggagtggtcggacctggacccgggtcagatcgagtcggcgtatcagattctcgccgacaagctggtccgcgagtttgcgcagaagtgggccgccttcagcgaggacccgagggcgccgtactttgcgcagctcgagaagggccgggagaacttccacgtgcacgtgctcgcctcctccaagaaggtcgggtcgttcgtggtcggccgctacgtcaggaagatgcgccagcacctcgtcgacgtcgtcttccggaagtgcgagcccgtcgacgccgattggctgcaggtgcaaaagagcgggaaccacaagtccaacgagatcaaggacgagggctttatccccgcctacctgctgccgaagcgccaatcggagctgcagtgggcgtggacgaacatagaaaagtacgagcgcgccacgctgagcgtcgcagagcgcgccagactcgtcgaggagtggaagcggagcctcgccgccgaggaatctgaccccgcggaacccgaacgccgtccgcgaaagtcgaccaaatccgcgtcagaatacatggcgctcgtcaggtggctcgtggacaacggcatcgcgaccgagcgcgagtggatgcgcgaggactcggacgggtacctgagctacaacgccacgggcgccacgcgcgcccagatcaaggccgcgctcgacaacgcggcccgcatcatggtcaacacgaagacggccgccgactacctggtcggcaggaacccgcccctcgacgtggaggacaacaggatctaccggctgtttcgcatgaacggctacgaccccgcctacgcgggcagcgtgctgctcggctggtgccgcaccggcttcggcaagcgcaacaccgtctggctcttcgggccggccacgaccggcaagacgaacctcgccgaggccatcagccactcggtgcccttctacggctgcgtcaactggaccaacgagaacttccccttcaacgactgcgtggacaagatgatcatctggtgggaggagggcaagatgacgtccaaggtcgtcgagagcgccaaggccatcctcggcggcagcaaggtgcgcgtcgaccagaagtgcaagaactcgcagcagatcgagcccacgcccgtcatcatcaccagcaacaccaacatgtgcgaggtcgtcgacgggaactcgaccacgttcgagcaccggcagccgctcgaggacaggatgttcaagttcgagctcaccgtcaggctgcagcccaccttcggcaagatcaccaagcaggaggtgcgcgagttctttaagtgggcggagctcaacgccgtcgacgtggagtacgactttctcgtgcgcaagatcaaccaatcggacactgggggcggggttaagcgcggggcagagcctacaaaggacgagcctcccgcgaagcgcgtgttcttctacggcgcgacttcggagggagaggacgtccgcgagggagccccgggggaatctgactccgtgaacttcgccgagaggtacgtgtcaaaatgctcgaagcacctgtcctggtcaaatatgcgctatccctgccgcgcctgcgagcgcatgaacgcggacgtgaacgtctgcaccccccacggatgcagagactgtcccgagtgctttccccgccccgcccccgtcccgatagccgagcacgacctgtgcctggccccgatcgaggactctgacttttacgtcggctgtatcgacgacgtcaataaagagcaataaaatgatttacagcagtcatgtcgtttgtcgatcaccccccagactggctcgaggagatcggagaggggctctccgagttcatcggactagaggcgggaccgccgaagcctaagccgggctaccaggaccgcgcgcgcggcctcgtcgtccccggctacaagtacctcgggcccttcaacggactcgacaggggcgagcccgtcaacgcggccgacgcggcggccaagaagcacgacgaggagtacgaccggctcctcaaggcgggggacaacccgtacctcgcctacaaccacgcggacgccgagttccagaaggacctcagcggcgactccagcctagccggcaacgccgcgaacgcgctcttccaggccaagaagagggtcctcgagcccttcggactggtcgagggagagccggagcccaagaagacgccttccgtcaagaggccgcacgcatcgccggactcgtcgagcggcgtcgggaagaagggcgaccagcccgcgcggaagaggctcgactttgggacggagcccgcgggtcaagacggagcgggacgagcggcccaggcagccggagatatggcatctgctgaggtggctgcgggtggtggcggaccagtgggcgacgatgcacaaggtgccgatggagtgggtaatgcctcaggaaattggcattacgattccgtttggatggacggcgctgtcatcaccaagtccacccgaacctggagcctgcccgcctacaacaaccacctctaccgccagatccagtccagcggcaccggagacggcacgtactttggttacagcacgccttggggatacttcgatttcaatcgattccactgccacttttctcccagggactggcagcggctcatcaacaaccactggggcatccgccccaagcggctccactttaagctcttcaacatccaggtcaaggaggtcacgacgaccgacggcaccacgaccatcgccaacaacctcaccagcaccatacaggtctttgcggacacggagtaccagctcccgtacgtgctcggcaacgcccacgagggctgcctgccgccgttcccggcggacgtcttcatgctgccgcagtacgcgtacctgacgctcaacgccaaccccacgaaccagggcgcggccgcgctcagcctgccgcagagcgccttctactgcctggagtactttccgagccagatgctgaggaccgggaacaacttctcgttcagctacgagttcgagaagctgcccttccactcgatgttcatgcacagccagagcctggaccggctcatgaacccgctcatcgaccagtacctctggtacctcaacgccacgaccggcaacaacctctccttcaacaaggccggcgccaagaacttccccgagtacttccgcaactggctgcccgggcccggccagcgcgtgcagcagtggagcacgatcggaacccagaacaacgcgcagaccggcacgtgggccagcgccaacaagtggatcctcatgggcaggtccagcaagatggcccccgggctggcccagccggtcaggaacgcccagaccgtcaccaacggctcgcagctcatcttcaacaacgagaccatcaagggctccaccgcgacggcctccaccgtacactcggggctgctcgtcaccaacgagtcggagaccgccccgaccaaccccaactcggcgacaaagtggggcgtcatgacggacaaccagcagaccacctccactacgccgaccgtcagcgacgacctcgaggcgcacgtcttcccgggcatggtctggcaggaccgcgacatctacctgcagggcccgatatgggccaagatcccggagacggacggccacttccacccgtccccgctcatgggcggcttcgggctcaagaacccgccgccgcagatcctcgtcaagaacacgcccgtgcccgccgtgccgcccacgaccttcacaccgcagaaggtcaactccttcatcacgcagtactccaccggccaggtcaccgtcgagatcgagtgggagctgcgcaaggagaagagcaagcgctggaaccccgagatccagtacacctccaacttcgagaactcggccaacgtacagttctccgtcaacggcgacggcgcgtacatcgagccgcgaccgatcggaacccggtacctcacccacaacctgtaaataaatcccccaataaaccgtgtattcgtttcagttgaactttggtctctgcg

SEQ ID NO: 45 - DNA, 4693 bp, Bovine adeno-associated virus
gtggcactcccccccctgtcgcgttcgctcgttcgctggctcgattgggggggtggcagctcaaagagctgccagacgacggccctctgggccgtcgcccccccaatcgagccagcgaacgagcgaacgcgacaggggggggagtgccacactctctagcaagggggttttgtaggtggtgatgtcattgttgatgtcattatagttgtcacgcgatagttaatgattaacagtcatgtgatgtgtgttatccaataggatgaaagcgcgcgaatgagatctcgcgagacttccggggtataaaaggggtgagtgaacgagcccgccgccattctctgctctggactgctagaggaccctcgctgccatggctaccttctatgaagtcattgttcgcgttccatttgatgtggaagagcacctgcctggaatttctgacaactttgtagactgggtaactggtcaaatttgggagctgcctcccgagtcagatttgaatttgactctgattgagcagcctcagctgacggtggctgacagaattcgccgcgtgttcctgtacgagtggaacaaattttccaagcaggagagcaaattctttgtgcagtttgaaaagggatctgaatattttcatctgcacacgctcgtggagacctccggcatctcttctatggtccttggccgctacgtgagtcagattcgcgcccagctggtgaaggtggtgttccagaacattgagccgcggattaacgactgggtcgccatcaccaaggtaaagaagggcggagccaataaggtggtggattctgggtatattcccgcctacctgctgccgaaggtccaaccagagcttcagtgggcgtggactaacctcgaagagtataaattggccgccctcaatctggaggagcgcaaacggctcgtcgctcagtttcagcttgagtcctcgcagcgctcgcaagaggcatcttcccagagggacgtttcggctgacccggtcatcaagagcaagacttcccagaaatacatggcgctggtaagctggctggtggaacatggcatcacttccgagaagcagtggattcaggagaatcaggagagctacctgtccttcaactccacgggaaactctcggagccagattaaagccgcgcttgacaacgcgtcaaaaattatgagtctgaccaaatctgcctcagactatctcgtgggacagactgttccagaggacatttctgaaaacagaatctggcagatttttgatctcaacggctacgacccggcatacgcgggctctgttctctacggctggtgcactcgcgcctttggaaagaggaacaccgtctggctgtatggacccgcgaccaccggaaagaccaacatcgcggaagccatctctcacaccgtgcccttttatggctgtgtgaactggactaatgagaactttccctttaatgactgtgtggaaaaaatgttgatctggtgggaggagggaaagatgaccagcaaggtggtggaacccgccaaggccatcttgggggggtctagagtacgagtggatcaaaaatgtaaatcctctgtacaagtagactctaccccggtgattatcacctccaatactaacatgtgtgtggtggtggatgggaactccacgacctttgaacaccagcagccgctggaagaccgcatgttcagatttgaactcatgcggcggctcccgccagattttggcaagattaccaagcaggaagtcaaagacttttttgcttgggcaaaggtcaaccaggtgccggtgactcacgagtttatggttcccaagaaagtggcgggaactgagagggcggagacttctagaaaacgcccactggatgacgtcaccaataccaactataaaagtccggagaagcgggcccggctctcagttgttcctgagacgcctcgcagttcagacgtgcctgtagagcccgctcctctgcgacctctcaactggtcttccaggtatgaatgcagatgtgactatcatgctaaatttgactctgtaacgggggaatgtgacgagtgtgaatatttgaatcggggcaaaaatggctgtatctttcataatgctacacattgtcaaatttgtcacgctgttcctccatgggaaaaggaaaatgtgtcagattttaatgattttgatgactgtaataaagagcagtaaataaagtgagtagtcatgtcttttgttgaccaccctccagattggttggaatcgatcggcgacggctttcgtgaatttctcggccttgaggcgggtcccccgaaacccaaggccaatcaacagaagcaagataacgctcgaggtcttgtgcttcctgggtacaagtatcttggtcctgggaacggccttgataagggcgatcctgtcaattttgctgacgaggttgcccgagagcacgacctctcctaccagaaacagcttgaggcgggcgataacccttacctcaagtacaaccacgcggacgcagagtttcaggagaaactcgcttctgacacttcttttgggggaaaccttgggaaggctgttttccaggctaaaaagaggattctcgaacctcttggcctggttgagacgccggataaaacggcgcctgcggcaaaaaagaggcctctagagcagagtcctcaagagccagactcctcgagcggagttggcaagaaaggcaaacagcctgccagaaagagactcaactttgacgacgaacctggagccggagacgggcctcccccagaaggaccatcttccggagctatgtctactgagactgaaatgcgtgcagcagctggcggaaatggtggcgatgcgggacaaggtgccgagggagtgggtaatgcctccggtgattggcattgcgattccacttggtcagagagccacgtcaccaccacctcaacccgcacctgggtcctgccgacctacaacaaccacctgtacctgcggctcggctcgagcaacgccagcgacaccttcaacggattctccaccccctggggatactttgactttaaccgcttccactgccacttctcgccaagagactggcaaaggctcatcaacaaccactggggactgcgccccaaaagcatgcaagtccgcatcttcaacatccaagttaaggaggtcacgacgtctaacggggagacgaccgtatccaacaacctcaccagcacggtccagatctttgcggacagcacgtacgagctcccgtacgtgatggatgcaggtcaggagggcagcttgcctcctttccccaacgacgtgttcatggtgcctcagtacgggtactgcggactggtaaccggaggcagctctcaaaaccagacagacagaaatgccttctactgtctggagtactttcccagccagatgctgagaaccggaaacaactttgagatggtgtacaagtttgaaaacgtgcccttccactccatgtacgctcacagccagagcctggataggctgatgaacccgctgctggaccagtacctgtgggagctccagtctaccacctctggaggaactctcaaccagggcaattcagccaccaactttgccaagctgaccaaaacaaacttttctggctaccgcaaaaactggctcccggggcccatgatgaagcagcagagattctccaagactgccagtcaaaactacaagattccccagggaagaaacaacagtctgctccattatgagaccagaactaccctcgacggaagatggagcaattttgccccgggaacggccatggcaaccgcagccaacgacgccaccgacttctctcaggcccagctcatctttgcggggcccaacatcaccggcaacaccaccacagatgccaataacctgatgttcacttcagaagatgaacttagggccaccaacccccgggacactgacctgtttggccacctggcaaccaaccagcaaaacgccaccaccgttcctaccgtagacgacgtggacggagtcggcgtgtacccgggaatggtgtggcaggacagagacatttactaccaagggcccatttgggccaaaattccacacacggatggacactttcacccgtctcctctcattggcggatttggactgaaaagcccgcctccacaaatattcatcaaaaacactcctgtacccgccaatcccgcaacgaccttctctccggccagaatcaacagcttcatcacccagtacagcaccggacaggtggctgtcaaaatagaatgggaaatccagaaggagcggtccaagagatggaacccagaggtccagttcacgtccaactacggagcacaggactcgcttctctgggctcccgacaacgccggagcctacaaagagcccagggccattggatcccgatacctcaccaaccacctctagcccaattctgttgcataccctcaataaaccgtgtattcgtttcagtaaaatactgcctcttgtggtcattcggcgtacaacagcttacaacaacaacaaaacccccttgctagagagtgtggcactcccccccctgtcgcgttcgctcgttcgctggctcgattgggggggtggcagctcaaagagctgccagacgacggccctctgggccgtcgcccccccaatcgagccagcgaacgagcgaacgcgacaggggggggagtgcca

SEQ ID NO: 46 - DNA, 5610 bp, Bovine parvovirus
acttccgggtcacgcccggtagttccgggtcaagtgacgtagttccggtgacgtgtcgctcacggctagggggttgggttacgagtgtcgaaaaaatttacataagaggaacgaatattaatgaggtggcgaaacattgtcctaatatggtgctgaacgctgattggttgtctatataaggtaacacacaacctgattggctagcgtcacatcctgataggaggtatataaagcacaacacggaagtgacagctcattcttctctcagctgtcagagagggaggacgtctcttggtgagtacaaaatgagctactacacttttgttgtaactatacctgataaaattgaagactatggacaagcttactatgatgtagttaacagagtaactttaactcatagagacaatgagaaatgggtatatgacccagaagacagggaaattatttttaaacaggctcaggtatatgttgactgcttagaaagaaggttaaaacagatgttagtgtccggaagtatgtacaattactttatacagctagagcaaggagaaaagcacaagaggtggcacatacacgtagtgttagacataagcgtgggaaatccaagaaactgtagagaagtgatagaaaaggtagaatatgaatacaacagcatttgctacggtagaccagtaagacagactcagattaatagaacaagcaacggtagttggaagatagagactgaagactttattatcaactacttactatgcaaaataccacctaaagaagctaagtatgcctggactaacattaaaaacaagataggagacgcttgtttaaacattgacttaagaaaagaaatttcagttagaccggacatagacgtaccgatgtggagacaagctagcggagacagaatgagagacttggtagaatggtgcataaaaaaccatgtatttacagaagaccaatacatggctaaatttgaagaaagctactacagctttgcatgcactaatcaaggcagacacatgctacaaacaagcttagaattagcagcaaaaaggacgactagcatgataccgctcggcgtttacttagcaggattcagtaacattcaagaagcaattgaagaggctaacaaaacagaatttgcagacatatacaacaacaaagtgtttgacttgctacagtttcaaggctacgacccagtagtagcaggatacattatatacgcttggagcatacgagcgacaggacgtagaggagccttatggttctacggaccaggacaaacaggaaaaagtataatggcaagggctatggctacatgcagcgtccgatacggctgcgtgaactggacaaactctaactttccatttcaagacttagcaacaaactgccaaataggatggtgggaagaaggggtaatcacagaagacattgtggaaagtgctaaagcactactgagcgggggtaaaataagagtagacagaaaatgtagagacagcgtagaaattacaccgccaccatttgtgattactagcaacaacgacatgacattagtgcaaggaggaaatcaagtaagctttgtccacaaaaaaccgctagaagacaggatgattaaatttaacttcaacaagagacttccacctaactttggcatagtagagagagaagacatgaaacaattttttaaatggagcagttttatctactacaacaaactgctaccaaaagaacaggcatacttaagtgatcctaaactgatagggcacgtagtcccatacacaagctttttaagacagactgcaaaagtagagaaaattgtaagaccattcgaggaacaagaacaagaagacttggcagaactagactcttggtttgcggaccccccatacatggggaagcccccaaaaaagagtgagtagctacatatattttgtactcactttgtgtgcgtgacacgtcactgacacacacgattttttgcagaagtacgctttgaggacaaacagttacttccgcaagaagaattagaccacatctgtcacaatcaagagtgctgtcaatacccatcgtgcgcaggatttcaacagtaagtgaaatcttgcattacttattgcgtaacttgccaagggcaacgacttagcaatgcatggtttcccttgcaggccgccgaccacctcttcacacctaccagaactcacagacgaagaagtctgtagcatactagatagtgaagaaggctgggacggggacaactttgcagaacagtaatggccgctaaactgggagggggcttagtaggggaagcagctatacaccgcatagaaagcttatcaggcaaagtacactataaggacaaatactggtttccagacaactacgtatatacaacaggaaaccaagaggaagaagacaaaatagtagcaaaacttttactagatcctaatgcaccagttaaagaatggggaaacggcaggtggtcctttgaatacggaccagaatggcgtagactgggctttataccacacacagatgacattaattaccgcggactctcataccacaaagcacctgggacacagctgctagaaggtatacacgagatacctccagaacagaaacaaggccctgaaagtataacacaaatagcaccacccacacaagactctgtactgttagagcccatgacaaatgacccacactataaaaaaccaaaacctccgggggacttaggagacattccaaagccgctcacaccatggcaactggcaaacaaaatagggccagactatgcaaggcaattattgacgatgtcgggacacgattttactggacgtacacccccagtacaaattcctgaccctggcatccgagaaggcctaaaagaattggaagaacaaagtaaactcatggaaagagtacaagccggtgaaggggacgaaaaacccagaggcggtcttactcttccaaaacacaggtatgtcggacccggaggggacctcccggcagggcgtccaatgtccaaactggatgaaattgctgctcgacatgatattgggtaccacactgaaataaaacataaacataacccttattactggtataacttttacgatgagcaaatggttaaagaaataaatgaaaacatggaccaaatagcagaggaaggggaatcctggctagcaaactttatacttgctacatggaaagccaaagctagctttactaaccctttaggtatattattagaacacttacaaccagattgggctacatactatgacccagcaaacacacatcataaacaatggattgcatttcagcgtgccttaacacagcacgggacagcgtcgacggagcgaccgaggacacctccgaccccggacaacgagatgtttccacacttggctaaacgaccccgactagatgaacctaataaatctgcttcttgctctacagacatgtcgtcctgtgaaatttcttccacacaatgcacaaacgacgaagacatggagctcaaccagactacagtcatggggatgccaagttcaactacagacagcacaatcgggaacactgggatccagggcacaggtgactgtgcgggaggcggggggggagcgcaacgatgtaccaacaaatggttagggggaatatcatggacgcataacacatttaccacataccaaacacgacgatgcatactgcaaccgtttacaaacaaatacacatttacaagcagtgtagatagcacaccaggaattacagtaaccacaccatggtactacatagacttaaactgcttctacagccacattcctccatctacaatgcaagaaataattgaaactacagacggctttaagccgttaacattaacagtaacaattacagaaattgtgggaaaagacgtaagctgcacaactacatcatctggggtgccaaacacagttacagactcacaaacagcaactttgctgctacacagggacgatcactacgaactgccatacgtgattggcggtggacaagaaacagtgcctgagcacttaccaggggactggtacaagctgccacaatactgctacacaaccgtaggcatggaaagtccatggggtaactggtcacaagcgcgaccagatgactgcgcaggaaacacctggtcggttaattgcacaaactactacagtacacaagacagtgaactatttctactagaaaacttagtgaacacacaactgcatccagggtgctcctggacgtcacaataccactttccacacttacctatggcatacactacacaatacccgtggagcacaagacggcaagacaacccatgtcaaaaacaaagaatagtggctgtacgaaactgttgctccacaacaaatacagacgccaacaaacgccaggttatagaggtagaccaggaccaagcagacatgggttttttcagaaagccgacaatgtggttgccggctaacagacacagagacggcgactgccaaatcatccctcccaaaggcagagaataccacgtactaccagttagatcaggactcccaccagtcatagttgtacgacagggaatttttaacccactcccagcaagtggtgtttttggcttaacctcgggaacagaacagccagggccaccgacagaagacaaagcagtcattacgccaggaggcaccacggtgcttacatctaacacactaacggtgaaacgcaaacacaaatacaaaaaccaaaaccacgacgtgcacacagtatacgaaggcaaacaagaacaaaaacgcctgtaccaactggtggtgcagcgagaaaggggagttggaggaccagcagagcccaaccacgtacaagagcgaattataggtagcaccggggaaaaacttccgggcagcagatacccgctacaaagcgaaattacatacgggcaacacacaggggctgtagaagagagtgagtccgggttctacgaatttcaaatctgggagagaaatccaaacacagacctagggaaagggggacacaaaccacccttagctcagtgggctatggaaaagccaccgcctacaatatacctccgaatgcttcctatgccctgtgcgccttgcaaaaacaaatacacaaaaagtccaggaatgaaaggagttataaacagctacattacatttcagctacagtactctatcaaatgggcttatactcctaggacccacaccagaaggtggaaccctaccagtccagcacttcttccaccaccacttcctggttctaccgtcgtgtacaaccttgactcccagaagttcaccaccgacaatcaatacaccatcgcagcagaatcctggcaattcaaaaacagattgagacataacagatgattacgtagttgttgtcatagcttttatgtccatgtacttttatttgatcttgttgtgtattttaaatcaaaatgatttgatttgattttaacttaatttgatttgatttgatttgatttgattgtatcacaaatattcttgtgaaagaaataaagaaaaagaaaacccaagacatccgagtgagctaccacgctggtgtcccgcgcctttggcgcgggacacccag

SEQ ID NO: 47 - DNA, 4467 bp, California sea lion adeno-associated virus
ttatatagcatgactcacatgttacgttgctgttatgtgtcgagcgagcgagcgagccaggagggggattgcccactctctcaaaagggactgaccattcctgactcatgcctgacctttgttcttctagtctgttcttttgctgacacatttcttatatgttacatattaactatggggtgactgcttttatccaatgagacacagggcgttgccctgcacatgggtatatctgtccgaatgagcgagcgctcagtacagagcgtctctgcttgttaacaagatggcttccttctacgaggtggtggccaagatccccagcgacctggaggagcaccttcccggcatctgcgatgactttgtctctgtgattatgagcaaggagtggcgtttgcccgagagctccgaccttgtcctggaccagattgaccagccgaagctgactatcgcggacgccgtccgcaaggtcttttactttgagtggctcaagtactgccgcgacgtggaagagcccttgttctttttccaatttgagaagggcaaggagaactttcacgtccacatggtcatcgagacctccaacgtgagttccatggtcctgggccggtacattggtactattaaaaagaagctggtccgcaaggtgtttcgggaggtcgagccccagatgcccgactggctagccgtgaccaagactaagcaatccgggggcgttaacaagacctacgacaagggctacattcccgcctacctgctacccaagacccaaccggagcttcagtgggcgtggacaaacatcgaagagtataagagcgccagcctgaacctggccgagcgcaaacggctggtggatgagttcctggcttcgcttcgccgcgacggcccgtctcagagcgagcctgacgaccagcagccccacggaccggtcatcagaaaccggaccagtcaaaagtacatggctctcgtgtcctggctcgtggagaatggaatcaccagcgaaaagcagtggatccaggaagaccaggaaagctacctttcatttaatgctgcaggcagctctaggagccagatcaaatcggccctggacaacgccagtcgaatcatgtctctcacaaagaaagcctctgactatctcgttggacagtccgtccccgaagatatcacagaaaataaaatctaccagctgtttaaaatgaacggatatgaccctgcttacctgggctccattttgctgggatggtgccagggcaggtttggcaaaagaaacaccgtctggctgtatggacccgcgacgacgggcaagacgaacctggcggaggcgattgcgcactctgtgccattttatggttgtgtcaattggaccaacgagaactttcccttcaacgactgcgtggacaaaatgctcatctggtgggaagaaggaaagatgacgtccaaggtggtggaatcggccaaggcgatcttgggcggatccaaggtccgcgtggaccaaaagtgcaagagctccgtgcagattgactcgaccccggtgatcatcacttccaataccgacatgtgctgcgtgattgacggcaattcaaccacgttcgagcaccggcagcccctcgaggaccgcatgttccgcatcaacctcgaacagagactctcccatgactttgggaaaattaccaagagggaggtgcgggaattcctagcctgggcgcaggaatatgaagtagacgtagagcataccttcgaggtgactaagctggcgaagccaaaggtcactaaaaggtccgcccctctgtctgatgactataaaagcccggcaaagagagcgcgcctcattcccgatcttgtcgcggaggaggcaacgtcgagcgctctagccgaggccgaggagtgggacctaaactgggaccgaaggtacgactgccgctgtgaggcacactctatgtctgtgcgggtagaggggctgtgtcgggactgtgaatatctgaaccggggaaaaaatatgtgtcttgttcacggggacaccgggtgtcatgtctgtcatgccgtccccccttgggtgtctgatcctgatgattgtactgatgagcaataaaagttcaaaattctaaactgaaatgtagccatgtcttctttgtttaaagagtacctgcagagtaccggactggtgggtatccagtcgggagcgccgaagccaaaggccggccagcagaagcaggatacagggtcctttgagtggaaaaagaaggaggacacagccagagggctggtccttcccggttacaagtacctcgggcccttcaacggtctagagcggggcgagcctgtgaatgccgcggacgccgcggcccagcgacacgaccgacagtacgatcgtattctacaacaagggggtaatccatacctcacgtacaaccacgccgaccgagagttccaggaggagctccagtctgacgagtcttttgggggaaatcttggcaaggctgtgtttcaggccaagaagcgaatcctagagcccctcggtctggttgaagaggatccctctcagccagattcgtcctcggacaacacggcgccacccgtgaaaaagtcccgtctcgaagaagcccagcccattcaaagtccagacgtttccagcagcactggcggaggaattgccgacgtcatgtctggagatgctgaaatggctgcagtgggcgggggagcaccgggcgtcgacggccagggtgccgagggagtgggtacttcctcgggtaattggcattgcgattcccagtggtcagaaggacacgtcagaaccaccagcaccagaacctgggtgttgcccagctacaacaaccacctgtataaacggcttggaagtagcgcacaatccaatacctacaacggattctccaccccctggggatacctcgacttcaatagatggcactgtcacttcagtcctcggaactggcaacgtctcatcaacaacaactggggcatcagaccaaaaagacttaatgttaaattgttcaacatacaagtcaaagaggtcacgacggaaggggggacgacgaccgtcgccaataaccttaccagcacgattcaggtgtttgcggacaacgcgtacgaactcccgtatgttgtcgacgcgggtcacgagggggcattgccgccgttcccaaacgacgtgtttatgattccccaatacggatactgcgggctggtgtctggtcaaagtcaggctcagtcggacttgtgttcgttttattgcctggagtattttccatcccagatgctgagaacaggaaacaattttgaaatgaatttcaggtttgaagacgttccatttcactccatgtacgcccacagccagtctctagacaggctcatgaatcctttaattgatcagtatctgtggagtctaaaacaaacaggaaacccgactggatcaacaacgagagacttaaaatttatcaagaacaaagttcccaattttgcacattatggaaaaaattggcttcctggaccttttattagacaacaggggtggacaacacaaaatattaataatagtgttgttaattttaatgacatgctgggaaaaaattcgacatttactttggacactagatggagttcattagcgcctggtccgtgtatgggggatgacggacgaactccatccaccaccaagttctcaaatgctcagctcatgtttggatctggaacacaacccaccgaaggcggtgaagatgctgtacatattacatccgagtcggaggtcaaggcaaccaacccaactgcaatcgatgaatacggacgagtggccgataatacgcaaaatgcaacaaccgccccaaccacagtgggaaatgctgcaatgggggccatgcctgggatggtgtggcaagatagggatatctatcttcaaggacccatctggggaaaaataccccatacagacggacattttcatccgtctcctctcatgggggggtttggatacagaaaaccccctccgcaaatttttattaaaaacacccccgttcctggaaatccggcaactacattttctccaaatagaataaacaatttcattactcaatactcaacgggacaagtgaccgttactattgactgggagctgcaaaaggaaaactcaaagagatggaacccagaagtacaatttacatcaaattttggcacggtcgattcactaaactgggcaccggacaacgcgggaaactacaaagaaccaagggtggtggggtctcgattccttacgcatatactataatcatacccaagtatgttgcatatcctcaataaaccgtgtattcgtatcagttataactacgtgtctgtctttcatgagtcatcaatcagacgtcccctttgagagagtgggcaatccccctcctggctcgctcgctcgctcgacacataacagcaacgtaacatgtgagtcatgctatataacacccagtcata

SEQ ID NO: 48 - DNA, 4395 bp, California sea lion adeno-associated virus
tatatagcatgactcacatgttacgttgctgttatgtgtcgagcgagcgagcgagcccaggaggcaggagggggattgcccactctctcaaaagggactgaccattcctgactcatgcctgacctttgttcttctagtctgttcttttgctgacacatttcttatatgttacatattaactatggggtgactgcttttatccaatgagacacagggcgttgccctgcacatgggtatatctgtccgaatgagcgagcgctcagtacagagcgtctctgcttgttaacaagatggcttccttctacgaggtggtggccaagatccccagcgacctggaggagcaccttcccggcatctgcgatgactttgtctctgtgattatgagcaaggagtggcgtttgcccgagagctccgaccttgtcctggaccagattgaccagccgaagctgactatcgcggacgccgtccgcaaggtcttttactttgagtggctcaagtactgccgcgacgtggaagagcccttgttctttttccaatttgagaagggcaaggagaactttcacgtccacatggtcatcgagacctccaacgtgagttccatggtcctgggccggtacattggtactattaaaaagaagctggtccgcaaggtgtttcgggaggtcgagccccagatgcccgactggctagccgtgaccaagactaagcaatccgggggcgttaacaagacctacgacaagggctacattcccgcctacctgctacccaagacccaaccggagcttcagtgggcgtggacaaacatcgaagagtataagagcgccagcctgaacctggccgagcgcaaacggctggtggatgagttcctggcttcgcttcgccgcgacggcccgtctcagagcgagcctgacgaccagcagccccacggaccggtcatcagaaaccggaccagtcaaaagtacatggctctcgtgtcctggctcgtggagaatggaatcaccagcgaaaagcagtggatccaggaagaccaggaaagctacctttcatttaatgctgcaggcagctctaggagccagatcaaatcggccctggacaacgccagtcgaatcatgtctctcacaaagaaagcctctgactatctcgttggacagtccgtccccgaagatatcacagaaaataaaatctaccagctgtttaaaatgaacggatatgaccctgcttacctgggctccattttgctgggatggtgccagggcaggtttggcaaaagaaacaccgtctggctgtatggacccgcgacgacgggcaagacgaacctggcggaggcgattgcgcactctgtgccattttatggttgtgtcaattggaccaacgagaactttcccttcaacgactgcgtggacaaaatgctcatctggtgggaagaaggaaagatgacgtccaaggtggtggaatcggccaaggcgatcttgggcggatccaaggtccgcgtggaccaaaagtgcaagagctccgtgcagattgactcgaccccggtgatcatcacttccaataccgacatgtgctgcgtgattgacggcaattcaaccacgttcgagcaccggcagcccctcgaggaccgcatgttccgcatcaacctcgaacagagactctcccatgactttgggaaaattaccaagagggaggtgcgggaattcctagcctgggcgcaggaatatgaagtagacgtagagcataccttcgaggtgactaagctggcgaagccaaaggtcactaaaaggtccgcccctctgtctgatgactataaaagcccggcaaagagagcgcgcctcattcccgatcttgtcgcggaggaggcaacgtcgagcgctctagccgaggccgaggagtgggacctaaactgggaccgaaggtacgactgccgctgtgaggcacactctatgtctgtgcgggtagaggggctgtgtcgggactgtgaatatctgaaccggggaaaaaatatgtgtcttgttcacggggacaccgggtgtcatgtctgtcatgccgtccccccttgggtgtctgatcctgatgattgtactgatgagcaataaaagttcaaaattctaaactgaaatgtagccatgtcttctttgtttaaagagtacctgcagagtaccggactggtgggtatccagtcgggagcgccgaagccaaaggccggccagcagaagcaggatacagggtcctttgagtggaaaaagaaggaggacacagccagagggctggtccttcccggttacaagtacctcgggcccttcaacggtctagagcggggcgagcctgtgaatgccgcggacgccgcggcccagcgacacgaccgacagtacgatcgtattctacaacaagggggtaatccatacctcacgtacaaccacgccgaccgagagttccaggaggagctccagtctgacgagtcttttgggggaaatcttggcaaggctgtgtttcaggccaagaagcgaatcctagagcccctcggtctggttgaagaggatccctctcagccagattcgtcctcggacaacacggcgccacccgtgaaaaagtcccgtctcgaagaagcccagcccattcaaagtccagacgtttccagcagcactggcggaggaattgccgacgtcatgtctggagatgctgaaatggctgcagtgggcgggggagcaccgggcgtcgacggccagggtgccgagggagtgggtacttcctcgggtaattggcattgcgattcccagtggtcagaaggacacgtcagaaccaccagcaccagaacctgggtgttgcccagctacaacaaccacctgtataaacggcttggaagtagcgcacaatccaatacctacaacggattctccaccccctggggatacctcgacttcaatagatggcactgtcacttcagtcctcggaactggcaacgtctcatcaacaacaactggggcatcagaccaaaaagacttaatgttaaattgttcaacatacaagtcaaagaggtcacgacggaaggggggacgacgaccgtcgccaataaccttaccagcacgattcaggtgtttgcggacaacgcgtacgaactcccgtatgttgtcgacgcgggtcacgagggggcattgccgccgttcccaaacgacgtgtttatgattccccaatacggatactgcgggctggtgtctggtcaaagtcagaatcagtcggacttgtgttcgttttattgcctggagtattttccatcccagatgctgagaacaggaaacaattttgaaatgaatttcaggtttgaagacgttccatttcactccatgtacgcccacagccagtctctagacaggctcatgaatcctttaattgatcagtatctgtggagtctaaaacaaacaggaaacccgactggatcaacaacgagagacttaaaatttatcaagaacaaagttcccaattttgcacattatggaaaaaattggcttcctggaccttttattagacaacaggggtggacaacacaaaatattaataatagtgttgttaattttaatgacatgctgggaaaaaattcgacatttactttggacactagatggagttcattagcgcctggtccgtgtatgggggatgacggacgaactccatccaccaccaagttctcaaatgctcagctcatgtttggatctggaacacaacccaccgaaggcggtgaagatgctgtacatattacatccgagtcggaggtcaaggcaaccaacccaactgcaatcgatgaatacggacgagtggccgataatacgcaaaatgcaacaaccgccccaaccacagtgggaaatgctgcaatgggggccatgcctgggatggtgtggcaagatagggatatctatcttcaaggacccatctggggaaaaataccccatacagacggacattttcatccgtctcctctcatgggggggtttggatacagaaaaccccctccgcaaatttttattaaaaacacccccgttcctggaaatccggcaactacattttctccaaatagaataaacaatttcattactcaatactcaacgggacaagtgaccgttactattgactgggagctgcaaaaggaaaactcaaagagatggaacccagaagtacaatttacatcaaattttggcacggtcgattcactaaactgggcaccggacaacgcgggaaactacaaagaaccaagggtggtggggtctcgattccttacgcatatactataatcatacccaagtatgttgcatatcctcaataaaccgtgtattcgtatcagttataactacgtgtctgtctttcatgagtcatcaatcagacgtccctttgagagagtgggcaatc

SEQ ID NO: 49 - DNA, 5106 bp, Goose parvovirus
ctcattggagggttcgttcgttcgaaccagccaatcaggggagggggaagtgacgcaagttccggtcacatgcttccggtgacgcacatccggtgacgtagttccggtcacgtgcttcctgtcacgtgtttccggtcacgtgacttccggtcatgtgacttccggtgacgtgtttccggctgttaggttgaccacgcgcatgccgcgcggtcagcccaatagttaagccggaaacacgtcaccggaagtcacatgaccggaagtcacgtgaccggaaacacgtgacaggaagcacgtgaccggaactacgtcaccggatgtgcgtcaccggaagcatgtgaccggaacttgcgtcacttccccctcccctgattggctggttcgaacgaacgaaccctccaatgagactcaaggacaagaggatattttgcgcgccaggaagtgacgtgcaatgccaccctatataagccaggaaacttccggtttagttcattcgttactctgctctcagagagaacggacctcaggtcggagagatggcactttctaggcctcttcagatttcttctgataaattctatgaagttattattagattatcatcggatattgatcaagatgtccccggtctgtctcttaactttgtagaatggctttctaccggagtttgggagcccacgggcatctggaacatggagcatgtgaatctaccgatggtgaccttggcagagaagatcaagaacattttcatacaaagatggaatcagttcaaccaggacgaaacggacttcttctttcaactggaagaaggcagtgagtacattcatcttcattgctgtattgcccagggcaatgtacggtcttttgttctcgggagatatatgtctcagataaaagactctatcataagagatgtatatgaagggaaacaaatcaagatccccgattggtttgctattactaaaaccaagaggggaggacagaataagaccgtgactgcagcatacatactgcattaccttattcctaaaaagcaacctgaactgcaatgggcctttaccaatatgcctttattcactgctgctgctctttgtctgcaaaagcggcaagaattgctggatgcatttcaagaaagtgatttggctgcccctttacctgatcctcaagcatcaactgtggcaccgcttatttccaacagagcggcaaagaactatagcaaccttgttgattggctcattgaaatggggataacatctgagaagcaatggctcactgagaaccgagagagctacagaagctttcaagcaacttcttcaaataatagacaagtgaaagctgcactggaaaatgcccgtgctgaaatgttattgacaaagactgcaactgattacctgataggaaaagaccctgtcctggatataactaagaatagggtctatcaaattctgaaaatgaataactacaaccctcaatacataggaagtatcctgtgcggctgggtgaagagagagttcaacaaaagaaacgccatatggctctacggacctgccaccaccgggaagaccaacattgcagaagctattgcccatgctgtacccttctatggctgtgttaactggactaatgagaactttccttttaatgattgtgttgataaaatgctgatttggtgggaggagggaaaaatgactaataaggttgttgaatctgcaaaagcaattttgggagggtctgctgtccgggtagaccagaaatgtaaaggatctgtttgtattgaacctactcctgtaattattactagtaatactgatatgtgtatgattgttgatggcaactctactacaatggaacatagaataccattagaggagcgtatgtttcaaattgtcctatcacataaattggagccttcttttggaaaaatttctaaaaaagaagtcagagaatttttcaaatgggccaatgacaatctagttcctgttgtgtctgagttcaaagtccgaactaatgaacaaaccaacttgccagagcccgttcctgaacgagcgaacgagccggaggagcctcctaagatctgggctcctcctactagggaggagttagaagagcttttaagagccagcccagaattgttctcatcagtcgctccaattcctgtgactcctcagaactcccctgagcctaagagaagcaggaacaattaccaggtacgctgcgctttgcatacttatgacaattctatggatgtatttgaatgtatggaatgtgagaaagcaaactttcctgaatttcaacctctgggagaaaattattgtgatgaacatgggtggtatgattgtgctatatgtaaagagttgaaaaatgaacttgcagaaattgagcatgtgtttgagcttgatgatgctgaaaatgaacaataaagatgactcaaagcagatatgtctacttttttagattcttttgaagagtggtatgagactgcagccgcctcgtggcggaatctgaaagctggagcccctcagccaaaaccaaaccagcagtctcagtctgtgtctccagacagagaacccgaacgaaaagataataatcggggctttgtacttcctggctataagtatcttgggcctggtaacggcctggataaaggcccacctgtcaataaggcggacagcgtcgcgcttgaacacgacaaggcctatgaccagcagcttaaagcgggagacaacccatatataaaattcaatcacgctgaccaggactttatagatagcctccaagacgaccagtcattcggaggtaatcttggaaaggctgtatttcaggccaaaaaacgtatcttagagccatttggcctagtagaagatcctgtcaacacggcacctgcaaaaaaaaatacagggaagcttactgaccattacccggtagttaagaagcctaaacttaccgaggaagtcagtgcgggaggtggtagcagtgccgtacaagacggaggagccaccgcggagggcaccgaacctgtggcagcatctgaaatggcagagggaggaggcggagctatgggcgactcttcagggggtgccgatggagtgggtaatgcctcgggaaattggcattgcgattcccaatggatgggaaacacagtcatcacaaagaccaccagaacctgggtcctgccaagctacaacaaccacatctacaaagcaattaccagcggaacctctcaagatgcaaatgtccagtatgcaggatacagtaccccctgggggtactttgatttcaaccgcttccactgccacttctcccctagagactggcagagacttatcaacaaccattggggaatcagacccaagtctcttaaattcaagatcttcaatgtccaagtcaaagaagtcacaacgcaggatcagacaaagaccattgcaaacaatctcacctcaacaattcaagtctttacggatgatgagcatcaactcccgtatgtcctgggctcggctacggaaggcaccatgccgccgttcccgtcggatgtctatgccctgccgcagtacgggtactgcacaatgcacaccaaccagaatggagcacggttcaatgaccgtagtgcattctactgcttagagtacttccctagtcagatgctaagaacaggcaacaactttgagttcacatttgactttgaagaagttcctttccatagcatgttcgctcattcacaggacttagacaggctgatgaaccccctagtggatcaatacctctggaatttcaatgaggtagacagcagcagaaatgctcaatttaaaaaggctgtgaaaggggcttatggcaccatgggccgcaattggctgccaggacctaaattcctggatcaaagagttagggcctacacaggaggaacagacaactatgcaaactggaacatctggagtaatgggaacaaggtgaatttgaaagacagacagtatctcctacaacccggacctgtgtcagctacttacacagaaggggaggcttccagccttccagctcaaaatattttagggatagctaaagatccatacagatcaggcagcactacagcaggaataagtgacattatggtcacggaagaacaagaagtagcacctacaaatggagtagggtggaaaccatatggtaggactgtaacgaatgaacaaaacactactacagctcctacaagttcagatctggatgttcttggagctttaccaggaatggtttggcagaacagggatatatatctgcagggacctattggggcaaaaataccgaagactgatggtaaattccatccttctccgaatctcggaggatttggcctgcacaatccaccaccgcaggtgttcatcaagaatacaccagtgcctgcagaccctccagtagaatacgtgcaccagaagtggaattcctacataacccagtactctacgggccagtgtacagtagagatggtgtgggagctgagaaaagagaattcaaagagatggaacccagaaatccagttcaccagtaatttcagtaacagaacaagcataatgtttgcacctaatgaaactggtggatatgtagaagatagattgattggaaccagatatctaactcaaaatctgtaaattctgtgtaaaaattcaaataaagcacttcctggcgcgcaaaatatcctcttgtccttgagtctcattggagggttcgttcgttcgaaccagccaatcaggggagggggaagtgacgcaagttccggtcacatgcttccggtgacgcacatccggtgacgtagttccggtcacgtgcttcctgtcacgtgtttccggtcacgtgacttccggtcatgtgacttccggtgacgtgtttccggcttaactattgggctgaccgcgcgcatgcgcgtggtcaacctaacagccggaaacacgtcaccggaagtcacatgaccggaagtcacgtgaccggaaacacgtgacaggaagcacgtgaccggaactacgtcaccggatgtgcgtcaccggaagcatgtgaccggaacttgcgtcacttccccctcccctgattggctggttcgaacgaacgaaccctccaatgaga

SEQ ID NO: 50 - DNA, 4980 bp, Goose parvovirus
cttattggagggttcgttcgttcgaaccagccaatcaggggagggggaagtgacgcaagttccagtcacgtgcttccggtgacgcacatccggtgacgtgcttcctgtcacgtgtttccggtcacgtgacttccggtgacgtgtttccggctgttaggttgaccacgcgcatgccgcgcggtcagcccaatagccggaaacacgtcaccggaagtcacgtgaccggaaacacgtgacaggaagcacgtcaccggatgtgcgtcaccggaagcacgtgactggaacttgcgtcacttccccctcccctgattggctggttcgaacgaacgaaccctccaataagactcaaggacaagaagatattttgcgcgccaggaagtgacgtggaatgctgccctatataagccaggaagcttccggtttagttcgttcgttactctgctctcagagagaacggatctcaggtcggagagatggcactttctaggcctcttcagatttcttccgataaattctatgaagttattattagattaccatcggatattgatcaagatgtccccggtctgtctcttaactttgtaggatggctttctaccggagtttgggagcccacgggcatctggaacatggagcatgtgaatctaccgatggtgaccttggcagagaagatcaaaaacattttcatacaaagatggaatcagttcaaccaggacgaaacggacttcttctttcaactggaagaaggcagtgagtacattcgtcttcattgctgtattgcccagggcaatgtacggtcttttgttctcgggagatatatgtctcagataaaagactctatcataagagatgtatatgaagggaaacaaatcaagatccccgattggtttgctattactaaaaccaagaggggaggacaaaataagaccgtgactgcagcatacatactgcattacctgattcctaaaaagcaacctgaactgcagtgggcctttaccaatatgcctttatttactgctgctgctctttgtctgcaaaagcggcaagaattgctggatgcatttcaagagagtgatttggctgcccctttacctgatcctcaagcatcaactgtggcaccgcttatttccaatagagcggcaaagaactatagcaaccttgttgattggctcattgaaatgggcataacatctgagaagcaatggctcactgagaaccgagagagctacagaagctttcaagcaacttcttcaaataatagacaagtgaaagctgcactggagaatgcccgtgctgaaatgctattaacaaagactgcaactgattacctgataggaaaagaccctgtcctggatataactaagaacagggtctatcaaattctgaaaatgaataactacaaccctcaatacataggaagtatcctgtgcggctgggtgaagagagagttcaacaaaaggaacgccatatggctctacggacctgccaccaccgggaagaccaacattgcagaagctattgcccatgctgtacccttctatggctgcgttaactggactaatgagaactttccttttaatgattgtgttgataagatgctgatttggtgggaggagggaaaaatgactaataaggttgttgaatttgcaaaagcaattttgggagggtctgctgtccgggtagaccagaaatgtaaaggatctgtttgtattgaacctactcctgtaattattaccagtaatactgatatgtgtatgattgttgatggcaactctactacaatggaacatagaataccattagaggagcgcatgtttcaaattgtcctatcacataaattggagccttcttttggaaaaatatctaaaaaggaagtcagagaatttttcaaatgggccaacgacaatttagttcctgttgtgtctgagttcaaagtccgaacgaatgaacaaaccaacttgccagagcccgttcctgaacgagcgaacgagccagaggagcctcctaaaatctgggctcctcctactagggaggagttagaagagcttttaagagccagcccagaattgttctcatcagttgctccaattcctgtgactcctcagaactcccctgagcctaagagaagcaggaaaaattaccaggtacgctgtgctttgcatacttatgacaattctatggatgtctttgaatgcatggaatgtgagaaggcaaactttcctgaatttcaacctctgggagaaaattattgtgatgaacatgggtggtatgattgtgctatatgtaaagagttgaaaaatgaacttgcagaaattgagcgtgtgtttgaacttgatgatgctgaaaatgaacaataaagatgactcaaagcagatatgtctacttttttagattcttttgaagagtggtatgaaactgcagccgcctcgtggcggaatctgaaagctggagcccctcacccaaaaccaaaccagcagactcagtctgtgtctccagccagagaacccgaacgaagagataataaccggggctttgtccttcctggctataagtatcttggccctggtaacggccttgataaagggccacccgttaataaggcggacagcgtcgcgcttgaacacgacaaggcctacgaccaacagcttaaagcgggagacaacccatatataaaattcaatcacgctgaccaggactttatagatagcctccaagacgaccagtcgttcggaggtaatcttggaaaggctgtatttcaggccaaaaaacgtatcttagaaccatttggcctagtagaagatcctgtcaacacggcacctgcaaaaaaaaatacagggaagcttaccgaccactacccggtagttaagaagcctaaacttaccgaggaagtcagtgcgggaggtggtagtagtgccgtacaagacggaggagccaccgcggagggcaccgaacctgtggcagcatctgaaatggcagagggagaaggcggagctttgggcgacgcttcagggggtgccgatggagtgggtaatgcctcgggaaattggcattgcgattcccaatggatgggaaacacagtcatcacaaagaccaccagaacctgggtcctgccaagctacaacaaccacatctacaaagcgattaccagtggaacctctcaagatgcaaatggccagtatgcaggatacagtaccccctgggggtactttgatttcaaccgcttccactgccacttctcccctagagactggcagagacttatcaacaaccattggggaatcagacccaagtctcttaaattcaagatcttcaatgttcaagtcaaggaagtcacaacgcaggatcagacaaagaccattgcaaacaatctcacctcaacaattcaagtttttacggatgatgagcatcaactcccgtatgtcctgggctcggctacggaagggaccatgccgccgttcccgtcggatgtctatgccctgccgcagtacgggtactgcacaatgcacaccaaccagaatggagcacggttcaatgaccgtagtgcattctactgcttagagtacttccctagtcagatgctgagaacaggtaacaactttgagttcacatttgactttgaagaagttcctttccacagcatgttcgctcattcacaggacttagacaggcttatgaaccccctagtggatcaatacctctggaatttcaatgaggtagacagcagcagaaatgctcaatttaaaaaagctgtgaaaggggcttatggcaccatgggccgcaattggctgccaggacctaaattcctggatcagagagttagggcctacccaggaggaacagacaattatgcaaactggaacatctggagtaatgggaacaaggtgaatttaaaggacaggcagtatctcctacaacccggacctgtgtcagctactcacacagaaagggaggcttccagcatcccagctcagaatattttagggatagctaaagatccatacagatctggcagcactacagcaggaataagtgatattatggtcacggacgagcaggaagtagcacccacaaatgtagtagggtggaaaccatatggtaggactgtaacgaatgaacaaaacactactacagctcctacaagttcagatctggatgttcttggagctttaccaggaatggtgtggcagaacagagatatatatctgcagggacctatttgggcaaaaataccgaagactgatggcaaattccatccttctccaaatctcggaggatttggcctgcacaatccaccaccacaggtcttcatcaagaatacaccagtacctgcagaccctccagtagaatatgtgcaccagaagtggaactcctacataactcagtactctacgggccagtgtacagtagaaatggtgtgggagctgagaaaagagaattcaaagagatggaacccagaaatccagttcaccagcaatttcagtaacagaactaatatcatgtttgcacctaatgaaactggtggatatgtagaagatagattgattggaaccagatatctaactcaaaatctgtaaattctgtgtaaaaattcaaataaagcacttcctggcgcgcaaaatatcttcttgtccttgagtcttattggagggttcgttcgttcgaaccagccaatcaggggagggggaagtgacgcaagttccagtcacgtgcttccggtgacgcacatccggtgacgtgcttcctgtcacgtgtttccggtcacgtgacttccggtgacgtgtttccggctattgggctgaccgcgcggcatgcgcgtggtcaacctaacagccggaaacacgtcaccggaagtcacgtgaccggaaacacgtgacaggaagcacgtcaccggatgtgcgtcaccggaagcacgtgactggaacttgcgtcacttccccctcccctgattggctggttcgaacgaacgaaccctccaataag

SEQ ID NO: 51 - DNA, 5050 bp, Goose parvovirus
ctcattggagggttcgttcgttcgaaccagccaatcaggggagggggaagtgacgcaagttccggtgacgcacatccggtgacgtagttccggtcacgtgcttcctgtcacgtgtttccggtcacgtgacttccggtcatgtgacttccggtgacgtgtttccggctgttaggttgaccacgcgcatgccgcgcggtcagcccaatagttaagccggaaacacgtcaccggaagtcacatgaccggaagtcacgtgaccggaaacacgtgacaggaagcacgtgaccggaactacgtcaccggatgtgcgtcaccggaacttgcgtcacttccccctcccctgattggctggttcgaacgaacgaaccctccaatgagactcaaggacaagaggatattttgcgcgccaggaagtgacgtgcaatgccaccctatataagccaggaaacttccggtttagttcattcgttactctgctctcagagagaacggacctcaggtcggagagatggcactttctaggcctcttcagatttcttctgataaattctatgaagttatcattagattaccatcggatattgatcaacatgtccccggtctgtctcttaactttgtagaatggctttctaccggagtttgggagcccacgggcatctggaacatggagcatgtgaatctaccgatggtgaccttggcagagaagatcaagaacattttcatacaaagatggaatcagttcaaccaggacgaaacggacttcttctttcaactggaagaaggcagtgagtacattcatcttcattgctgtattgcccagggcaatgtacggtcttttgttctcgggagatatatgtctcagataaaagactctatcataagagatgtatatgaagggaaacaaatcaagatccccgattggtttgctattactaaaaccaagaggggaggacagaataagaccgtgactgcagcatacatactgcattaccttattcctaaaaagcaacctgaactgcaatgggcctttaccaatatgcctttattcactgctgctgctctttgtctgcaaaagcggcaagaattgctggatgcatttcaagaaagtgatttggctgcccctttacctgatcctcaagcatcaactgtggcaccgcttatttccaacagagcggcaaagaactatagcaaccttgttgattggctcattgaaatggggataacatctgagaagcaatggctcactgagaaccgagagagctacagaagctttcaagcaacttcttcaaataatagacaagtgaaagctgcactggaaaatgcccgtgctgaaatgttattgacaaagactgcaaccgattacctgataggaaaagaccctgtcctggacataactaagaatagggtctatcagattctgaaaatgaataactacaaccctcaatacataggaagtatcctgtgcggctgggtgaagagagagttcaacaaaagaaacgccatatggctctacggacctgccaccaccgggaagaccaacattgcagaagctattgcccatgctgtacccttctatggctgtgttaactggactaatgagaactttccttttaatgattgtgttgataaaatgctgatttggtgggaggagggaaaaatgactaataaggttgttgaatctgcaaaagcaattttaggagggtctgctgtccgggtagaccagaaatgtaaaggatctgtttgtattgaacctactcctgtaattattactagtaatactgatatgtgtatgattgttgatggcaactctactacaatggaacatagaataccgttagaggagcgtatgtttcaaattgtcctatcacataaattggagccttcttttggaaaaatttctaaaaaagaagtcagagaatttttcaaatgggccaatgataatctagttcctgttgtgtctgagttcaaagtccgaacgaatgaacaaactaacttgccagagcccgttcctgaacgagcgaacgagccggaggagcctcctaagatctgggctcctcctactagggaggagttagaagagcttttaagagccagcccagaattgttctcatcagtcgctccaattcctgtgactcctcagaactcccctgagcctaagagaagcaggaacaattaccaggtacgctgcgctttgcatacttatgacaattctatggatgtatttgaatgtatggaatgtgagaaagcaaactttcctgaatttcaacctctgggagaaaattattgtgatgaacatgggtggtatgattgtgctatatgtaaagagttgaaaaatgaacttgcagaaattgagcatgtgtttgaacttgatgatgctgaaaatgaacaataaagatgactcaaagcagatatgtctacttttttagattcttttgaagagtggtatgaaactgcagccgcctcgtggcggaatctgaaagctggagcccctcacccaaaaccaaaccagcagactcagtctgtgtctccagccagagaacccgaacgaagagataataaccggggctttgtacttcctggctataagtatcttggccctggtaacggccttgataaagggccacccgttaataaggcggacagcgtcgcgcttgaacacgacaaggcctacgaccaacagcttaaagcgggagacaacccatatataaaattcaatcacgctgaccaggactttatagatagcctccaagacgaccagtcgttcggaggtaatcttggaaaggctgtatttcaggccaaaaaacgtatcttagaaccatttggcctagtagaagatcctgtcaacacggcacctgcaaaaaaaaatacagggaagcttaccgaccactacccggtagttaagaagcctaaacttaccgaggaagtcagtgcgggaggtggtagtagtgccgtacaagacggaggagccaccgcggagggcaccgaacctgtggcagcatctgaaatggcagagggaggaggcggagctttgggcgacgcttcagggggtgccgatggagtgggtaatgcctcgggaaattggcattgcgattcccaatggatgggaaacacagtcatcacaaagaccaccagaacctgggtcctgccaagctacaacaaccacatctacaaagcgattaccagtggaacctctcaagatgcaaatgtccagtatgcaggatacagtaccccctgggggtactttgatttcaaccgcttccactgccacttctcccctagagactggcagagacttatcaacaaccattggggaatcagacccaagtctcttaaattcaagatcttcaatgtccaagtcaaagaagtcacaacgcaggatcagacaaagaccattgcaaacaatctcacgtcaacaattcaagtctttacggatgacgagcatcaactcccgtatgtcctgggctcggctacagaaggcaccatgccgccgttcccgtcggatgtgtatgccctgccgcagtacgggtattgcacaatgcacaccaaccagaacggtgcacgattcaatgaccggagtgcattctactgcttagaatacttccccagtcagatgctaagaacaggcaacaactttgagtttacgtttgactttgaagaagttcctttccacagcatgttcgctcattcacaggacttagacaggctgatgaaccccttagtggatcaatacctctggaatttcaatgaggtagacagcagcagaaatgctcaatttaaaaaggctgtgaaaggcgcttatggcaccatgggccgcaattggctgccaggacctaaattcctggaccagagagttagggcctatccaggcggaacagataattacgcaaactggaacatctggagtaatggaaacaaggttaatttgaaggacaggcagtacctcctgcaacccggacctgtatcagctactcacacaaaagcagaggcttccagcatcccagcccaaaatattttaggtttagctaaagatccatacagatctggcagcactacagcaggaataagtgatattatggtcacggacgagcaggaagtagcacctacaaacggcgtagggtggaaaccatatggcaagactgtaacgaatgaacaaaacactactacagctcctacaagttcagatctggatgttcttggagctttaccaggaatggtttggcagaacagggatatatatctgcagggacctatttgggcaaaaataccgaagactgatggtaaattccatccttctccgaatctcggaggatttggtctgcacaatccaccaccgcaggtgttcatcaagaatacaccagtgcctgcagaccctccagtagaatacgtgcaccagaagtggaattcctacataacccagtactctacgggccagtgtacagtagagatggtgtgggagctgagaaaagagaattcaaagagatggaacccagaaatccagttcaccagtaatttcagtgacagaacaagcataatgtttgcacctaatgaaactggtggatatgtagaagatagattaattggaaccagatatctaactcaaaatctgtaaattctgtgtaaaaattcaaataaagcacttcctggcgcgcaaaatatcctcttgtccttgagtctcattggagggttcgttcgttcgaaccagccaatcaggggagggggaagtgacgcaagttccggtgacgcacatccggtgacgtagttccggtcacgtgcttcctgtcacgtgtttccggtcacgtgacttccggtcatgtgacttccggtgacgtgtttccggcttaactattgggctgaccgcgcggcatgcgcgtggtcaacctaacagccggaaacacgtcaccggaagtcacatgaccggaagtcacgtgaccggaaacacgtgacaggaagcacgtgaccggaactacgtcaccggatgtgcgtcaccggaacttgcgtcacttccccctcccctgattggctggttcgaacgaacgaaccctccaatgag

SEQ ID NO: 52 - DNA, 5054 bp, Goose parvovirus
ctcattggagggttcgttcgttcgaaccagccaatcaggggggggggaagtgacgcaagttccggtgacgcacatccggtgacgtagttccggtcacgtgcttcctgtcatgtgacttccggtcatgtgacttccggtcatgtgacttccggtgacgtgtttccggctgttatgttgaccacacgcatgccgcgcggtcagcccaatagttaagccggaaacacgtcaccggaagtcacatgaccggaagtcacatgaccggaagtcacatgacaggaagcacgtgaccggaactacgtcaccggatgtgcgtcaccggaacttgcgtcacttcccccccccctgattggctggttcgaacgaacgaaccctccaatgagactcaaggacaagaggatattttgcgcgccaggaagtgacgtgcaatgccaccctatataagccgggaaacttccggtttagttcattcgttactctgctctcagagagaacggacctcaggtcggagagatggcactttctaggcctcttcagatttcttctgataaattctatggagttatcattagattaccatcggatattgatcaagatgtccccggtctgtctcttaactttgtagaatggctttctaccggagtttgggagcccacgggcatctggaacatggagcatgtgaatctaccgatggtgaccttggcagagaagatcaagaacattttcatacaaagatggaatcagttcaaccaggacgaaacggacttcttctttcaactggaagaaggcagtgagtacattcattttcattgctgtattgcccagggcaatgtacggtcttttgttctcgggagatatatgtctcagataaaagactctatcataagagatgtatatgaagggaaacaaatcaagatccccgattggtttgctattactaaaaccaagaggggaggacagaataagaccgtgactgcagcatacataccgcattaccttattcctaaaaagcaacctgaactgcaatgggcctttaccaatatgcctttattcactgctgctgctctttgtctgcaaaagcggcaagaattgctggatgcatttcaagaaagtgatttggctgcccctttacctgatcctcaagcatcaactgtggcaccgcttatttccaacagagcggcaaagaactatagcaaccttgttgattggctcattgaaatggggataacatctgagaagcaatggctcactgagaaccgagagagctacagaagctttcaagcaacttcttcaaataatagacaagtgaaagctgcactggaaaatgcccgtgctgaaatgttattgacaaaaactgcgaccgattacctgataggaaaaggccctgtcctggacataactaagaatagggtctatcagattctgaaaatgaataactacaaccctcaatacataggaagtatcctgtgcggctgggtgaagagagagttcaacaaaagaaacgccatatggctctacggacctgccaccaccgggaagaccaacattgcagaagctattgcccatgctgtacccttctatggctgtgttaactggactaatgagaactttccttttaatgattgtgttgataaaatgctgatttggtgggaggagggaaaaatgactaataaggttgttgaatctgcaaaagcaattttaggagggtctgctgtccgggtagaccagaaatgtaaaggatctgtttgtactgaacctactcctgtaattattactagtaataccgatatgtgtatgattgttgatggcaactctactacaatggaacatagaataccgttagaggagcgtatgtttcaaattgtcctatcacataaattggagccttcttttggaaaaatttctaaaaaggaagtcagagaatttttcaaatgggccaatgataatctagttcctgttgtgtctgagttcaaagtccgaacgaatgaacaaactaacttgccagagcccgttcctgaacgagcgaacgagccggaggagcctcctaagatctgggctcctcctactagggaggagttagaagagcttttaagagccagcccagaattgttctcatcagtcgctccaattcctgtgactcctcagaactcccctgagcctaaaagaagcaggaacaattaccaggtacgctgcgctttgcatacttatgacaattctatggatgtatttgaatgtatggaatgtgagaaagcaaactttcctgaatttcaacctctgggagaaaattattgtgatgaacatgggtggtatgattgtgctatatgtaaagagttgaaaaatgaacttgcagaaattgagcatgtgtttgaacttgatgatgctgaaaatgaacaataaagatgactcaaagcagatatgtctacttttttagattcttttgaagagtggtatgaaactgcagccgcctcgtggcggaatctgaaagctggagcccctcacccaaaaccaaaccagcagactcagtctgtgtctccagccagagaacccgaacgaagagataataaccggggctttgtacttcctggctataagtatcttggccctggtaacggccttgataaagggccacccgttaataaggcggacagcgtcgcgcttgaacacgacaaggcctacgaccaacagcttaaagcgggagacaacccatatataaaattcaatcacgctgaccaggactttatagatagcctccaagacgaccagtcgttcggaggtaatcttggaaaggctgtatttcaggccaaaaaacgtatcttagaaccatttggcctagtagaagatcctgtcaacacggcacctgcaaaaaaaaatacagggaagcttaccgaccactacccggtagttaagaagcctaaacttaccgaggaagtcagtgcgggaggtggtagtagtgccgtacaagacggaggagccaccgcggagggcaccgaacctgtggcagcatctgaaatggcagagggaggaggcggagctttgggcgacacttcagggggtgccgatggagtgggtaatgcctcgggaaattggcattgcgattcccaatggatgggaaacacagtcatcacaaagaccaccagaacctgggtcctgccaagctacaacaaccacatctacaaagcgattaccagtggaacctctcaagatgcaaatgtccagtatgcaggatacagtaccccctgggggtactttgatttcaaccgcttccactgccacttctcccctagagactggcagagacttatcaacaaccattggggaatcagacccaagtctcttaaattcaagatcttcaatgtccaagtcaaagaagtcacaacgcaggatcagacgaagaccattgcaaacaatctcacgtcaacaattcaagtctttacggatgacgagcatcaactcccgtatgtcctgggctcggctacagaaggcaccatgccgccgttcccgtcggatgtgtatgccctgccgcagtacgggtattgcacaatgcacaccaaccggaacggtgcacgattcaatgaccggagtgcattctactgcttagaatacttccccagtcagatgctaagaacaggcaacaactttgagtttacgtttgactttgaagaagttcctttccacagcatgttcgctcattcacaggacttagacaggctgatgaaccccttagtggatcaatacctctggaatttcaatgaggtagacagcagcagaaatgctcaatttaaaaaggctgtgaaaggcgcttatggcaccatgggccgcaattggctgccaggacctaaattcctggaccagagagttagggcctatacaggcggaacagataattacgcaaattggaacatctggagtaatggaaacaaggttaatttgaaggacaggcagtacctcctgcaacccggacctgtatcagctactcacacagaagcagaggcttccagcatcccagcccaaaatattttaggtttagctaaagatccatacagatctggcagcactacagcaggaataagtgatattatggtcacggacgagcaggaagtagcacctacaaacggcgtagggtggaaaccatatggcaaaactgtaacgaatgaacaaaacactactacagctcctacaagttcagatctggaggttcttggagctttaccaggaatggtttggcagaacagggatatatatctgcagggacctatttgggcaaaaataccgaagactgatggtaaattccatccttctccgaatctcggaggatttggtctgcacaatccaccaccgcaggtgttcatcaagaatacaccagtgcttgcagaccctccagtagaatacgtgcaccagaagtggaattcctacataacccagtactctacgggccagtgtacagtagagatggtgtgggagctgagaaaagagaattcaaagagatggaacccagaaatccagttcaccagtaatttcagtgacagaacaagcataatgtttgcacctaatgaaactggtggatatgtagaagatagattaattggaaccagatatctaactcaaaatctgtaaattctgtgtaaaaattcaaataaagcacttcctggcgcgcaaaatatcctcttgtccttgagtctcattggagggttcgttcgttcgaaccagccaatcaggggggggggaagtgacgcaagttccggtgacgcacatccggtgacgtagttccggtcacgtgcttcctgtcatgtgacttccggtcatgtgacttccggtcatgtgacttccggtgacgtgtttccggcttaactattgggctgaccgcgcggcatgcgtgtggtcaacataacagccggaaacacgtcaccggaagtcacatgaccggaagtcacatgaccggaagtcacatgacaggaagcacgtgaccggaactacgtcaccggatgtgcgtcaccggaacttgcgtcacttcccccccccctgattggctggttcgaacgaacgaaccctccaatgag

SEQ ID NO: 53 - DNA, 5104 bp, Goose parvovirus
ctcattgtagggttcgttcgttcgccccagccaatcatgggagggggaagtgacgcaagttccggtcacatgcttccggtgacgcacatccggtgacgcagttccggtcacgtgcttcctgtcacgtgtttccggtcacgtgacttccggtcatgtgacttccggtgacgtgtttccggctgttaggttgaccacgcgcatgccgcgcggtcagcccaatgttaagccggaaacacgtcaccggaagtcacatgaccggaagtcacgtgaccggaaacacgtgacaggaagcacgtgaccggaactgcgtcaccggatgtgcgtcaccggaagcatgtgaccggaacttgcgtcacttccccctcccatgattcgctggggcgaacgaacgaaccctacaatgagactcaaggacaagaggatattttgcgcgccaggaagtgacgtgcaatgccactctgtataagccaggaaacttccggtttagttcattcgttactctgctctcagagagaacggacctcaggtcggagagatggcactttctaggcctcttcagatttcttctgataaattctatgaagttattattagattaccatcggatattgatcacgatgtccccggtctgtctcttaactttgtagaatggctttctaccggagtttgggagcccacgggcatctggaacatggagcatgtgaatctaccgatggtgaccttggcagagaagatcaagaacattttcatacaaagatggaatcagttcaaccaggacgaaacggacttcttctttcaactggaagaaggcagtgagtacattcatcttcattgctgtattgcccagggcaatgtacggtcttttgttctcgggagatatatgtctcagataaaagactctatgataagagatgtatatgaagggaagcaaattaagatccccgattggtttgctattactaaaaccaagaggggaggacagaataagaccgtgactgcagcatacatactgcattaccttattcctaaaaagcaacctgaactgcaatgggcctttaccaatatgcctttatttactgctgctgctctttgtctgcaaaagcggcaagaattgctggatgcatttcaagagagtgatttggctgcccctttacctgatcctcaagcatcaactgtggcaccgcttatttccaacagagcgacaaagaactatagcaaccttgttgattggctcattgaaatgggcataacatctgagaagcaatggctcactgagaaccgagagagctacagaagctttcaagcaacttcttcaaataatagacaagtgaaagctgcactggaaaatgcccgtgctgaaatgttattaacaaagactgcaactgattacctgataggaaaagaccctgtcctggacataactaagaatagggtctatcaaattctgaaaatgaataactacaaccctcaatacataggaagtatcctgtgcggctgggtgaagagagagttcaacaaaagaaacgccatatggctctacggacctgccaccaccgggaagaccaacattgcagaagctattgcccatgctgtacccttctatggctgtgttaactggactaatgagaactttccttttaatgattgtgttgataagatgctgatttggtgggaggagggaaaaatgaccaataaggttgttgaatctgcaaaagcaattttgggagggtctgctgtccgggtagaccagaaatgtaaaggatctgtttgtattgaacctactcctgtaattattactagtaataccgacatgtgtatgattgttgatggcaactctactacaatggaacatagaataccattagaggagcgtatgtttcaaattgtcctatcacataaattggaaccttcttttggaaaaatttctaaaaaagaagtcagagaatttttcaaatgggccaatgacaatctagttcctgttgtgtctgagttcaaagtccgaacgaatgaacaaaccaacttgccagagcccgttcctgaacgagcgaacgagccggaggagcctcctaagatctgggctcctcctactagggaggagttagaagagcttttaagagccagcccagaattgttctcatcagtcgctccaattcctgtgactcctcagaactcccctgagcctaagagaagcaggaacaattaccaggtacgctgcgctttgcatacttatgacaattctatggatgtatttgaatgtatggaatgtgagaaagcaaactttcctgaatttcaacctctgggagaaaattattgtgatgaacatgggtggtatgattgtgctatatgtaaagaattgaaagatgaacttgcagaaattgagcatgtgtttgagcttgatgatgctgaaaatgaacaataaagatgactcaaagcagatatgtctacttttttagattcctttgaagagtggtatgagactgcagccgcctcgtggcggaatctgaaagctggagcccctcagccaaaaccaaaccagcagtctcagtctgtgtctccagacagagaacccgaacgaagagataataatcggggctttgtacttcctggctataagtatcttgggcctggtaacggccttgataaaggcccacctgtcaataatgcggacagcgtcgcgcttgaacacgacaaggcctacgaccagcagcttaaagcgggagacaatccatatataaaattcaatcacgctgaccaggactttatagatagtctccaagacgaccagtcattcggaggtaatcttggaaaggctgtatttcaggccaaaaaacgtatcttagagccatttggcctagtagaagatcctatcaacacggcacctgcaaaaaaaaatacagggaagcttactgaccattacccggtagttaagaagcctaaacttaccgaggaagtcagtgcgggaggtggtagcagtgccgtacaagacggaggagccaccgcggagggcaccgaacctgtggcagcatctgaaatggcagagggaggaggcggagctatgggcgactcttcagggggtgccgatggagtgggcaatgcctcgggaaattggcattgcgattcccaatggatgggaaacacagtcatcacaaagaccaccagaacctgggtcctgccaagctacaacaaccacatctacaaagcaattaccagtggaacctctcaagatgcaaatgtccagtatgcaggatacagtaccccctgggggtactttgatttcaaccgcttccactgccacttctcccctagagactggcagagacttatcaacaaccattggggaatcagacccaaatctcttaaattcaagatcttcaatgtccaagtcaaagaagtcacaacgcaggatcagacaaagaccattgcaaacaatctcacctcaacgattcaagtctttacggatgatgagcatcaactcccgtatgtcctgggctcggctacggaaggcaccatgccgccgttcccgtcggatgtctatgccctgccgcagtacgggtactgcacgatgcacaccaaccagaatggagcacggttcaatgaccgtagtgcattctactgcttagagtacttccctagtcagatgctaagaacaggcaacaactttgagttcacatttgactttgaagaagttcctttccatagcatgttcgctcattcacaggacctagacaggctgatgaaccccctagtggatcaatacctctggaatttcaatgaggtagacagcagcagaaatgctcaatttaaaaaggctgtgaaaggggcttatggcaccatgggccgcaattggctgccaggacctaaattcctggatcgaagagttagggcctacacaggaggaacagacaactatgcaaactggaacatctggagtaatgggaacaaggtgaatttaaaagacaggcagtatctcctacaacccggacctgtgtcagctactcacacagaaggggaggcttccagcattccagctcaaaatattttagggatagctaaagatccatacagatctggcagcactacagcaggaataagtgacattatggtcacggacgaacaagaagtagcacctacaaatggagtagggtggaaaccatatggtaggactgtaacgaatgaacaaaacactattacagctcctacaagctcagatctggaagttcttggagctttaccaggaatggtttggcagaacagggatatatatctgcagggacctatttgggcaaaaataccgaagactgatggcaaattccatccttctccgaatctcggaggatttggcctgcacaatccaccaccgcaggtgttcatcaagaatacaccagtgcctgcagaccctccagtagaatacgtgcaccagaagtggaattcctacataacccagtactctacgggccagtgtacagtagagatggtgtgggagctgagaaaagagaattcaaagagatggaacccagaaatccagttcaccagtaatttcagtaacagaacaagcataatgtttgcacctaatgaaaccggtggatatgtagaaaaaagattgattggaaccagatatctaactcaaaatctgtaaattctgtgtaaaaattcaaataaagcacttcctggcgcgcaaaatatcctcttgtccttgagtctcattgtagggttcgttcgttcgccccagcgaatcatgggagggggaagtgacgcaagttccggtcacatgcttccggtgacgcacatccggtgacgcagttccggtcacgtgcttcctgtcacgtgtttccggtcacgtgacttccggtcatgtgacttccggtgacgtgtttccggcttaacattgggctgaccgcgcggcatgcgcgtggtcaacctaacagccggaaacacgtcaccggaagtcacatgaccggaagtcacgtgaccggaaacacgtgacaggaagcacgtgaccggaactgcgtcaccggatgtgcgtcaccggaagcatgtgaccggaacttgcgtcacttccccctcccatgattggctggggcgaacgaacgaaccctacaatgag

SEQ ID NO: 54 - DNA, 5106 bp, Goose parvovirus
ctcattggagggttcgttcgttcgaaccagccaatcaggggagggggaagtgacgcaagttccggtcacatgcttccggtgacgcacatccggtgacgtagttccggtcacgtgcttcctgtcacgtgtttccggtcacgtgacttccggtcatgtgacttccggtgacgtgtttccggctgttaggttgaccacgcgcatgccgcgcggtcagcccaatagttaagccggaaacacgtcaccggaagtcacatgaccggaagtcacgtgaccggaaacacgtgacaggaagcacgtgaccggaactacgtcaccggatgtgcgtcaccggaagcatgtgaccggaacttgcgtcacttccccctcccctgattggctggttcgaacgaacgaaccctccaatgagactcaaggacaagaggatattttgcgcgccaggaagtgacgtgcaatgccaccctatataagccaggaaacttccggtttagttcattcgttactctgctctcagagagaacggacctcaggtcggagagatggcactttctaggcctcttcagatttcttctgataaattctatgaagttattattagattatcatcggatattgatcaagatgtccccggtctgtctcttaactttgtagaatggctttctaccggagtttgggagcccacgggcatctggaacatggagcatgtgaatctaccgatggtgaccttggcagagaagatcaagaatatcttcatacaaaggtggaatcagttcaatcaggacgaaacggacttcttctttcaactggaagaaggcagtgagtacattcatcttcattgctgtattgcccagggcaatgtacggtcttttgttctcgggagatatatgtctcagataaaagactctatcataagagatgtatatgaaggaaaacaaatcaagatccccgattggtttgctatcactaaaaccaagcggggaggacaaaataagaccgtgactgcagcatacatattgcactacctgatacctaaaaaacaacctgagctgcaatgggcctttaccaatatgccattatttagtccggctgctctttgtctgcaaaagcggcaagaattgctggatgcatttcaagaaagcgatttggccgcccctttacctgatcctcaggcatcaactgtggcaccacttatttccaacagagcggcaaagaactatagcaaccttgttgattggctcattgaaatgggcataacatccgagaagcagtggctcactgagaaccgagagagctacagaagttttcaagcaacttcttcaaataatagacaagtgaaagctgcattggaaaatgcccgtgccgaaatgctattaacaaagactgcaaccgattacctgataggaaaagatcctgtcctggacataactaagaacagggtctatcaaattctgaaaatgaataattacaaccctcaatacataggaagtatcctgtgcggctgggtgaagagagagttcaacaaaagaaacgccatatggctctacggacctgccaccaccgggaagaccaacattgcagaagctattgcccatgctgtacccttctatggctgcgttaactggactaacgagaactttccttttaatgattgtgtcgataagatgttgatttggtgggaggagggaaagatgactaacaaggttgtagagtctgcgaaagcaattttggggggctctgctgtccgggtagaccagaaatgtaaagggtctgtttgtattgaacctactcctgtaattattaccagtaacactgacatgtgtatgattgttgatggtaactccactacgatggagcatagaataccactagaggagcgtatgtttcaaatcgtactatcacataaattagagccttctttcggaaaaatctcgaaaaaagaagttagagaattctttaaatgggccaatgataacttagttcctgttgtatctgagttcaaagtccgaacgaatgaacaaaccaacttgccagagcccgttcctgaacgagcgaacgagccggaggagcctcctaagatctgggcccctcctactagggaggagttagaagagcttttaagagccagcccggaactgttctcagcagttgctccgattcctgtgactcctgagaactctcccgagcctaagagaagcaggaacaattaccaggtacggtgtgctttgcatacttatgacaattctatggatgtctttgaatgtatggactgcgagacggccaattttccggaatttcaacctctgggggaaaactgttgtgatgaacatgggtggtatgactgtactatctgtaaagaattgaaagatgaacttgcagaaattgagcatgtgtttgagcttgatgatgctgaaaatgaacaataaagatgactcaaaacagatatgtctacttttttagattcattcgaagagtggtatgagactgcagccgcctcgtggcggaatctgaaagctggagcccctcacccaaaaccaaaccagcagactcagtctgtgtctccagccagagaacccgaacgaagagatagtaaccggggctttgtacttcctggctataagtatcttggccctggtaacggccttgataaagggccgcccgttaataaggcggacagcgtcgcgcttgaacacgacaaggcctacgaccaacagcttaaagcgggagacaacccttatataaaattcaatcacgctgaccaggactttatagatagcctccaagacgaccggtcgttcggaggtaacctcggaaaggccgtattccaggccaaaaaacgtatcctagagccattcggtctagtagaagactcgatcaacacggcacccgtcaaaaaaaatacagggaaacttactgaccattacccggtggttaagaagcctaaacttaccgaggaggtcagtgcaggaggtggtaccagtgcagtacaagacggaggagccaccgcggagggtaccgaacctgtggcagcatctgaaatggcagagggaggaggcggagctttgggcgacgcttcagggggtgccgatggagtgggtaatgcctcgggaaattggcattgcgattcccaatggatgggaaacacagtcatcacaaaaactacccgaacttgggtcttgccgagctacaataaccacatctacaaagcaattaccagcggaacctctcaggacgcaactgtccagtatgctggatacagtactccctgggggtacttcgatttcaaccgcttccactgccacttctccccgagagactggcaaagacttatcaacaaccattggggaatcagacccaagtcccttaaatttaagatcttcaatgtccaagtcaaagaagtcacaacgcaggatcagacgaagaccattgcaaacaatctcacgtcaacgattcaagtgttcacggatgatgagcatcaactcccgtatgtgctgggctcggctacggaaggcaccatgccgccgttcccgtcggatgtgtatgccctgccgcagtacgggtattgcacaatgcacaccaaccagaacggtgcacgattcaatgaccggagtgcattctactgcttagaatacttccccagtcagatgctaagaacaggcaacaactttgagttcacgtttgactttgaagaagttcctttccacagcatgttcgctcattcacaggacttagacaggctgatgaaccccttagtggatcaatacctctggaatttcaatgaggtagacagcagcagaaaagctcaatttaaaaaagctgtgaaaggcgcttatggcaccatgggccgcaattggctgccaggacctaaactcctggaccagagagttagggcctatacaggcggaacagataattatgcaaactggaacatctggagtaatggaaacaaggtcaatttgaaggacaggcagtacctcttgcaacccggacctgtatcagctactcacacaaaagtagaggcttccagcatcccagcccaaaatattttaggtttagctaaagatccatacagatctggcagcactacagcaggaataagtgatattatggtcacggacgagcaggaagtagcacctacaaatggcgtagggtggaaaccatatggcaagactgtaacgaatgaacaaaacagtactacagctcctacgagttcagatcttgatgttcttggagctttaccaggaatggtttggcagaacagagatatatatctacagggacctatttgggctaaaataccaaagaccgatggcaaattccatccttctccgaatctcggaggatttggcctgtacaacccaccaccacaggtcttcatcaagaatacaccggtacctgcagaccctccggtagaatacgtacaccagaagtggaattcttacataacccagtactctacgggccagtgtacagtagagatggtgtgggagctgagaaaagagaattcaaagagatggaacccagaaatccagttcaccagtaatttcagtaacagaacaagcataatgtttgcacctaatgaaactggtggatatgtagaagatagattgattggaaccagatatctaactcaaaatctgtaaattctgtgtaaaaattcaaataaagcacttcctggcgcgcaaaatatcctcttgtccttgagtctcattggagggttcgttcgttcgaaccagccaatcaggggagggggaagtgacgcaagttccggtcacatgcttccggtgacgcacatccggtgacgtagttccggtcacgtgcttcctgtcacgtgtttccggtcacgtgacttccggtcatgtgacttccggtgacgtgtttccggcttaactattgggctgaccgcgcgcatgcgcgtggtcaacctaacagccggaaacacgtcaccggaagtcacatgaccggaagtcacgtgaccggaaacacgtgacaggaagcacgtgaccggaactacgtcaccggatgtgcgtcaccggaagcatgtgaccggaacttgcgtcacttccccctcccctgattggctggttcgaacgaacgaaccctccaatgaga

SEQ ID NO: 55 - DNA, 5106 bp, Goose parvovirus
ctcattggagggttcgttcgttcgttcccgcgaatcaggggagggggaagtgacgcaagttccggccacgtgtttccggtgacgcacatccggtgacgtacttcctgtcacgtgcttccggtgatgtgtttcctgtcacgtgacttccggtcatgtgacttccggtgacgtatttccggctgttaggttgaccacgcgcatgccgcgcggtcagcccaatagttaagccggaaatacgtcaccggaagtcacatgaccggaagtcacgtgacaggaaacacatcaccggaagcacgtgacaggaagtacgtcaccggatgtgcgtcaccggaaacacgtggccggaacttgcgtcacttccccctcccctgattggcgggttcgaacgaacgaaccctacaatgagactcaaggacacggggatattttgcgcgccaggaagtgacgttaggggctgccctatataagccagtaagcttccggtttggttcattcgttactctgctctcacagagaacggacctcaggtcggagacatggcactttctaggcctctgcagatttcttctgatagattctatgaagttattattagattaccatcggatattgatcaggatgttcccggtctgtctcttacctttgtagaatggctttctaccggagtttgggagcccacgggcatctggaacatggagcgtgtgaatctaccgatggtgactttggcagagaaaatcaagaatatcttcatacaaaggtggaatcagttcaaccaggacgaaacggacttcttctttcaactggaagaaggcagtgagtacattcatcttcattgctgtattgcccagggcaatgtacggtcttttgttctcgggagatatatgtctcagataaaagactctatcataagagatgtatatgaaggaaaacaaatcaagatccccgattggtttgctatcactaaaaccaggcggggaggacaaaataagaccgtgactgcagcatacatattgcactacctgatacctaaaaaacaacctgagctgcaatgggcctttaccaatatgccattatttagtccggctgctctttgtctgcaaaagcggcaagaattgctggatgcatttcaagaaaccgatttggccgcccctttacctgatcctcaggcatcaactgtggcaccacttatttccaacagagcggcaaagaactatagcaaccttgttgattggctcattgaaatgggcataacatccgagaagcagtggctcactgagaaccgagagagctacagaagttttcaagcaacttcttcaaataatagacaagtgaaagctgcattggaaaatgcccgtgccgaaatgctattaacaaagactgcaaccgattacctgataggaaaagatcctgtcctggacataactaagaacagggtctatcaaattctgaaaatgaataattacaaccctcaatacataggaagtatcctgtgcggctgggtgaagagagagttcaacaaaagaaacgccatatggctctacggacctgccaccaccgggaagaccaacattgcagaagctattgcccatgctgtacccttctatggctgcgttaactggactaacgagaactttccttttaatgattgtgtcgataagatgttgatttggtgggaggagggaaagatgactaacaaggttgtagagtctgcgaaagcaattttggggggctctgctgtccgggtagaccagaaatgtaaagggtctgtttgtattgaacctactcctgtaattattaccagtaacactgacatgtgtatgattgttgatggtaactccactacgatggagcatagaataccactagaggagcgtatgtttcaaatcgtactatcacataaattagagccttctttcggaaaaatctcgaaaaaagaagttagagaattctttaaatgggccaatgataacttagttcctgttgtatctgagttcaaagtccgaacgaatgaacaaaccaacttgccagagcccgttcctgaacgagcgaacgagccggaggagcctcctaagatctgggcccctcctactagggaggagttagaagagcttttaagagccagcccgggactgttctcagcagttgctccgattcctgtgactcctgagaactctcccgagcctaagagaagcaggaacaattaccaggtacgatgtgctttgcatacttatgacaattctatggatgtctttgaatgtatggactgcgagacggccaattttccggaatttcaacctctgggggaaaactgttgtgatgaacatgggtggtatgactgtactatctgtaaagaattgaaagatgaacttgcagaaattgagcatgtgtttgagcttgatgatgctgaaaatgaacaataaagatgactcaaaacagatatgtctacttttttagattcattcgaagagtggtatgagactgcagccgcctcgtggcggaatctgaaagctggagcccctcacccaaaaccaaaccagcagactcagtctgtgtctccagccagagaacccgaacgaagagatagtaaccggggctttgtacttcctggctataagtatcttggccctggtaacggccttgataaagggccgcccgttaataaggcggacagcgtcgcgcttgaacacgacaaggcctacgaccaacagcttaaagcgggagacaacccttatataaaattcaatcacgctgaccaggactttatagatagcctccaagacgaccggtcgttcggaggtaacctcggaaaggccgtattccaggccaaaaaacgtatcctagagccattcggtctagtagaagactcgatcaacacggcacccgtcaaaaaaaatacagggaaacttactgaccattacccggtggttaagaagcctaaacttaccgaggaggtcagtgcaggaggtggtaccagtgcagtacaagacggaggagccaccgcggagggtaccgaacctgtggcagcatctgaaatggcagagggaggaggcggagctttgggcgacgcttcagggggtgccgatggagtgggtaatgcctcgggaaattggcattgcgattcccaatggatgggaaacacagtcatcacaaaaactacccgaacttgggtcttgccgagctacaataaccacatctacaaagcaattaccagcggaacctctcaggacgcaactgtccagtatgctggatacagtactccctgggggtacttcgatttcaaccgcttccactgccacttctccccgagagactggcaaagacttatcaacaaccattggggaatcagacccaagtcccttaaatttaagatcttcaatgtccaagtcaaagaagtcacaacgcaggatcagacgaagaccattgcaaacaatctcacgtcaacgattcaagtgttcacggatgatgagcatcaactcccgtatgtgctgggctcggctacggaaggcaccatgccgccgttcccgtcggatgtgtatgccctgccgcagtacgggtattgcacaatgcacaccagccagaacggtgcacgattcaatgaccggagtgcattctactgcttagaatacttccccagtcagatgctaagaacaggcaacaactttgagttcacgtttgactttgaagaagttcctttccacagcatgttcgctcattcacaggacttagacaggctgatgaaccccttagtggatcaatacctctggaatttcaatgaggtagacagcagcagaaaagctcaatttaaaaaagctgtgaaaggcgcttatggcaccatgggccgcaattggctgccaggacctaaactcctggaccagagagttagggcctatacaggcggaacagataattatgcaaactggaacatctggagtaatggaaacaaggtcaatttgaaggacaggcagtacctcttgcaacccggacctgtatcagctactcacacaaaagtagaggcttccagcatcccagcccaaaatattttaggtttagctaaagatccatacagatctggcagcactacagcaggaataagtgatattatggtcacggacgagcaggaagtagcacctacaaatggcgtagggtggaaaccatatggcaagactgtaacgaatgaacaaaacagtactacagctcctacgagttcagatcttgatgttcttggagctttaccaggaatggtttggcagaacagagatatatatctacagggacctatttgggctaaaataccaaagacagatggcaaattccatccttctccgaatctcggaggatttggcctgtacaacccaccaccacaggtcttcatcaagaatacaccggtacctgcagaccctccggtagaatacgtacaccagaagtggaattcttacataacccagtattcttcgggccagtgtacagtagagatggtgtgggagctcagaaaagagaattcaaagcggtggaatccagaaattcagttcaccagcaatttcagtgacagaacaagcataatgtttgcacctaatgaaactggtggatacatagaagatagattgattggaaccagatatctaactcaaaatctgtaatgtctgtaaaaagattcaaataaaacacttcctggcgcgcaaaatatccccgtgtccttgagtctcattgtagggttcgttcgttcgaacccgccaatcaggggagggggaagtgacgcaagttccggccacgtgtttccggtgacgcacatccggtgacgtacttcctgtcacgtgcttccggtgatgtgtttcctgtcacgtgacttccggtcatgtgacttccggtgacgtatttccggcttaactattgggctgaccgcgcggcatgcgcgtggtcaacctaacagccggaaatacgtcaccggaagtcacatgaccggaagtcacgtgacaggaaacacatcaccggaagcacgtgacaggaagtacgtcaccggatgtgcgtcaccggaaacacgtggccggaacttgcgtcacttccccctcccctgattcgcgggaacgaacgaacgaaccctccaatgag

SEQ ID NO: 56 - DNA, 5050 bp, Goose parvovirus
ctcattggagggttcgttcgttcgaaccagccaatcaggggagggggaagtgacgcaagttccggtgacgcacatccggtgacgtagttccggtcacgtgcttcctgtcacgtgtttccggtcacgtgacttccggtcatgtgacttccggtgacgtgtttccggctgttaggttgaccacgcgcatgccgcgcggtcagcccaatagttaagccggaaacacgtcaccggaagtcacatgaccggaagtcacgtgaccggaaacacgtgacaggaagcacgtgaccggaactacgtcaccggatgtgcgtcaccggaacttgcgtcacttccccctcccctgattggctggttcgaacgaacgaaccctccaatgagactcaaggacaagaggatattttgcgcgccaggaagtgacgtgcaatgccaccctatataagccaggaaacttccggtttagttcattcgttactctgctctcagagagaacggacctcaggtcggagagatggcactttctaggcctcttcagatttcttctgataaattctatgaagttatcattagattaccatcggatattgatcaagatgtccccggtctgtctcttaactttgtagaatggctttctaccggagtttgggagcccacgggcatctggaacatggagcatgtgaatctaccgatggtgaccttggcagagaagatcaagaacatcttcatacaaaggtggaatcagttcaaccaggacgaaacggacttcttctttcaactggaagaaggcagtgagtacattcatcttcattgctgtattgcccagggcaatgtacggtcttttgttctcgggagatatatgtctcagataaaagactctatcataagagatgtatatgaagggaaacaaatcaagatccccgattggtttgctattactaaaaccaagaggggaggacagaataagaccgtgactgcagcatacatactgcattaccttattcctaaaaagcaacctgaactgcaatgggcctttaccaatatgcctttattcactgctgctgctctttgtctgcaaaagcggcaagaattgctggatgcatttcaagaaagtgatttggctgcccctttacctgatcctcaagcatcaactgtggcaccgcttatttccaacagagcggcaaagaactatagcaaccttgttgattggctcattgaaatggggataacatctgagaagcaatggctcactgagaaccgagagagctacagaagctttcaagcaacttcttcaaataatagacaagtgaaagctgcactggaaaatgcccgtgctgaaatgttattgacaaagactgccaccgattacctgataggaaaagaccctgtcctggacataactaagaatagggtctatcagattctgaaaatgaataactacaaccctcaatacataggaagtatcctgtgcggctgggtgaagagagagttcaacaaaagaaacgccatatggctctacggacctgccaccaccgggaagaccaacattgcagaagctattgcccatgctgtacccttctatggctgtgttaactggactaatgagaactttccttttaatgattgtgttgataaaatgctgatttggtgggaggagggaaaaatgactaataaggttgttgaatctgcaaaagcaattttaggagggtctgctgtccgggtagaccagaaatgtaaaggatctgtttgtattgaacctactcctgtaattattactagtaatactgatatgtgtatgattgttgatggcaactctactacaatggaacatagaataccgttagaggagcgtatgtttcaaatcgtcctatcacataaattggagccttcttttggaaaaatttctaaaaaagaagtcagagaatttttcaaatgggccaatgataatctagttcctgttgtgtctgagttcaaagtccgaacgaatgaacaaactaacttgccagagcccgttcctgaacgagcgaacgagccggaggagcctcctaagatctgggctcctcctactagggaggagttagaagagcttttaagagccagcccagaattgttctcatcagtcgctccaattcctgtgactcctcagaactcccctgagcctaagagaagcaggaacaattaccaggtacgctgcgctttgcatacttatgacaattctatggatgtatttgaatgtatggaatgtgagaaagcaaactttcctgaatttcaacctctgggagaaaattattgtgatgaacatgggtggtatgattgtgctatatgtaaagagttgaaaaatgaacttgcagaaattgagcatgtgtttgaacttgatgatgctgaaaatgaacaataaagatgtctcaaagcagatatgtctacttttttagattcttttgaagagtggtatgaaactgcagccgcctcgtggcggaatctgaaagctggagcccctcacccaaaaccaaaccagcagactcagtctgtgtctccagccagagaacccgaacgaagagataataaccggggctttgtacttcctggctataagtatcttggccctggtaacggccttgataaagggccacccgttaataaggcggacagcgtcgcgcttgaacacgacaaggcctacgaccaacagcttaaagcgggagacaacccatatataaaattcaatcacgctgaccaggactttatagatagcctccaagacgaccagtcgttcggaggtaatcttggaaaggctgtatttcaggccaaaaaacgtatcttagaaccatttggcctagtagaagatcctgtcaacacggcacctgcaaaaaaaaatacagggaagcttaccgaccactacccggtagttaagaagcctaaacttaccgaggaagtcagtgcgggaggtggtagtagtgccgtacaagacggaggagccaccgcggagggcaccgaacctgtggcagcatctgaaatggcagagggaggaggcggagctttgggcgacgcttcagggggtgccgatggagtgggtaatgcctcgggaaattggcattgcgattcccaatggatgggaaacacagtcatcacaaagaccaccagaacctgggtcctgccaagctacaacaaccacatctacaaagcgattaccagtggaacctctcaagatgcaaatgtccagtatgcaggatacagtaccccttgggggtactttgatttcaaccgcttccactgccacttctcccctagagactggcagagacttatcaacaaccattggggaatcagacccaagtctcttaaattcaagatcttcaatgtccaagtcaaagaagtcacaacgcaggatcagacgaagaccattgcaaacaatctcacgtcaacaattcaagtctttacggatgacgagcatcaactcccgtatgtcctgggctcggctacggaaggcaccatgccgccgttcccgtcggatgtctatgccctgccgcagtacgggtattgcacaatgcacaccaaccagaacggtgcacgattcaatgaccggagtgcattctactgcttagaatacttccccagtcagatgctaagaacaggcaacaactttgagttcacgtttgactttgaagaagttcctttccacagcatgttcgctcattcacaggacttagacaggctgatgaaccccttagtggatcaatacctctggaatttcaatgaggtagacagcagcagaaatgctcaatttaaaaaggctgtgaaaggcgcttatggcaccatgggccgcaattggctgccaggacctaaattcctggaccagagagttagggcctatacaggcggaactgataattatgcaaactggaacatctggagtaatggaaacaaggttaatttgaaggacaggcagtacctcctgcaacccggacctgtatcagctactcacacagaagcagaggcttccagcatcccagcccaaaatattttaggtttagctaaagatccatacagatctggcagcactacagcaggaataagtgatattatggtcacggacgagcaggaagtagcacctacaaacggcgtagggtggaaaccatatggcaagactgtaacgaatgaacaaaacactactacagctcctacaagttcagatctggatgttcttggagctttaccaggaatggtttggcagaacagggatatatatctacagggacctatttgggcaaaaataccgaagactgatggtaaattccatccttctccgaatctcggaggatttggtctgcacaatccaccaccgcaggtgttcatcaagaatacaccagtgcctgcagaccctccagtagaatacgtgcaccagaagtggaattcctacataacccagtactctacgggccagtgtacagtagagatggtgtgggagctgagaaaagagaattcaaagagatggaacccagaaatccagttcaccagtaatttcagtgacagaacaagcataatgtttgcacctaatgaaactggtggatatgtagaagatagattaattggaaccagatatctaactcaaaatctgtaaattctgtgtaaaaattcaaataaagcacttcctggcgcgcaaaatatcctcttgtccttgagtctcattggagggttcgttcgttcgaaccagccaatcaggggagggggaagtgacgcaagttccggtgacgcacatccggtgacgtagttccggtcacgtgcttcctgtcacgtgtttccggtcacgtgacttccggtcatgtgacttccggtgacgtgtttccggcttaactattgggctgaccgcgcggcatgcgcgtggtcaacctaacagccggaaacacgtcaccggaagtcacatgaccggaagtcacgtgaccggaaacacgtgacaggaagcacgtgaccggaactacgtcaccggatgtgcgtcaccggaacttgcgtcacttccccctcccctgattggctggttcgaacgaacgaaccctccaatgag

SEQ ID NO: 57 - DNA, 5106 bp, Goose parvovirus
ctcattggagggttcgttcgttcgaaccagccgctcatgctaggcggaagtgacgcaagttccggtgacgcacatccggtgacgcacatccggtgacgtagttccggtcacgtgcttcctgtcacgtgtttccggtcacgtgacttccggtcatgtgacttccggtgacgtgtttccggctgttaggttgaccacgcgcatgccgcgcggtcagcccaatagttaagccggaaatacgtcaccggtagtcacatgaccggaagtcacgtgaccggaaacacgtgacaggaagcacgtgaccggaactacgtcaccggatgtgcgtcaccggatgtgcgtcaccggaacttgcgtcacttccccctcccctgattggctggttcgaacgaacgaaccctccaatgagactcaaggacaagaggatattttgcgcgccaggaagtgacgtgcaatgccaccctatataagccaggaaacttccggtttagttcattcgttactctgctctcagagagaacggacctcaggtcggagagatggcacattctaggcctcttcagatttcttctgataaattctatgaagttatcattagattaccatcggatattgatcaagatgtccccggtctgtctcttaactttgtagaatggctttctaccggagtttgggagcccacgggcatctggaacatggagcatgtgaatctaccgatggtgaccttggcagagaagatcaagaacatcttcatacaaaggtggaatcagttcaaccaggacgaaacggacttcttctttcaactggaagaaggcagtgagtacattcatcttcattgctgtattgcccagggcaatgtacggtcttttgttctcgggagatatatgtctcagataaaagactctatcataagagatgtatatgaagggaaacaaatcaagatccccgattggtttgctattactaaaaccaagaggggaggacagaataagaccgtgactgcagcatacatactgcattaccttattcctaaaaagcaacctgaactgcaatgggcctttaccaatatgcctttattcactgctgctgctctttgtctgcaaaagcggcaagaattgctggatgcatttcaagaaagtgatttggctgcccctttacctgatcctcaagcatcaactgtggcaccgcttatttccaacagagcggcaaagaactatagcaaccttgttgattggctcattgaaatggggataacatctgagaagcaatggctcactgagaaccgagagagctacagaagctttcaagcaacttcttcaaataatagacaagtgaaagctgcactggaaaatgcccgtgctgaaatgttattgacaaagactgccaccgattacctgataggaaaagaccctgtcctggacataactaagaatagggtctatcagattctgaaaatgaataactacaaccctcaatacataggaagtatcctgtgcggctgggtgaagagagagttcaacaaaagaaacgccatatggctctacggacctgccaccaccgggaagaccaacattgcagaagctattgcccatgctgtacccttctatggctgtgttaactggactaatgagaactttccttttaatgattgtgttgataaaatgctgatttggtgggaggagggaaaaatgactaataaggttgttgaatctgcaaaagcaattttaggagggtctgctgtccgggtagaccagaaatgtaaaggatctgtttgtattgaacctactcctgtaattattactagtaatactgatatgtgtatgattgttgatggcaactctactacaatggaacatagaataccgttagaggagcgtatgtttcaaatcgtcctatcacataaattggagccttcttttggaaaaatttctaaaaaagaagtcagagaatttttcaaatgggccaatgataatctagttcctgttgtgtctgagttcaaagtccgaacgaatgaacaaactaacttgccagagcccgttcctgaacgagcgaacgagccggaggagcctcctaagatctgggctcctcctactagggaggagttagaagagcttttaagagccagcccagaattgttctcatcagtcgctccaattcctgtgactcctcagaactcccctgagcctaagagaagcaggaacaattaccaggtacgctgcgctttgcatacttatgacaattctatggatgtatttgaatgtatggaatgtgagaaagcaaactttcctgaatttcaacctctaggagaaaattattgtgatgaacatgggtggtatgattgtgctatatgtaaagagttgaaaaatgaacttgcagaaattgagcatgtgtttgagcttgatgatgctgaaaatgaacaataaagatgactcaaagcagatatgtctacttttttagattcttttgaagagtggtatgagactgcagccgcctcgtggcggaatctgaaagctggagcccctcacccaaaaccaaaccagcagactcagtctgtgtctccagccagagaacccgaacgaagagataataaccggggctttgtacttcctggctataagtatcttggccctggtaacggccttgataaagggccacccgttaataaggcggacagcgtcgcgcttgaacacgacaaggcctacgaccaacagcttaaagcgggagacaacccatatataaaattcaatcacgctgaccaggactttatagatagcctccaagacgaccagtcgttcggaggtaatcttggaaaggctgtatttcaggccaaaaaacgtatcttagaaccatttggcctagtagaagatcctgtcaacacggcacctgcaaaaaaaaatacagggaagcttaccgaccactacccggtagttaagaagcctaaacttaccgaggaagtcagtgcgggaggtggtagtagtgccgtacaagacggaggagccaccgcggagggcaccgaacctgtggcagcatctgaaatggcagagggaggaggcggagctttgggcgacgcttcagggggtgccgatggagtgggtaatgcctcgggaaattggcattgcgattcccaatggatgggaaacacagtcatcacaaagaccaccagaacctgggtcctgcccagctacaacaaccacatctacaaagcgattaccagtggaacctctcaagatgcaaatgtccagtatgcaggatacagtaccccctgggggtactttgatttcaaccgcttccactgccacttctcccctagagactggcagagacttatcaacaaccattggggaatcagacccaagtctcttaaattcaagatcttcaatgtccaagtcaaagaagtcacaacgcaggatcagacgaagaccattgcaaacaatctcacgtcaacaattcaagtctttacggatgacgagcatcaactcccgtatgtcctgggctcggctacggaaggcaccatgccgccgttcccgtcggatgtctatgccctgccgcagtacgggtattgcacaatgcacaccaaccagaacggtgcacgattcaatgaccggagtgcattctactgcttagaatacttccccagtcagatgctaagaacaggcaacaactttgagttcacgtttgactttgaagaagttcctttccacagcatgttcgctcattcacaggacttagacaggctgatgaaccccttagtggatcaatacctctggaatttcaatgaggtagacagcagcagaaatgctcaatttaaaaaggctgtgaaaggcgcttacggcaccatgggccgcaattggctgccaggacctaaattcctggaccagagagttagggcctatacaggcggaactgataattatgcaaactggaacatctggagtaatggaaacaaggttaatttgaaggacaggcagtacctcctgcaacccggacctgtatcagctactcacacagaagcagaggcttccagcatcccagcccaaaatattttaggtttagctaaagatccatacagatctggcagcactacagcaggaataagtgatattatggtcacggacgagcaggaagtagcacctacaaacggcgtagggtggaaaccatatggcaagactgtaacgaatgaacaaaacactactacagctcctacaagttcagatctggatgttcttggagctttaccaggaatggtttggcagaacagggatatatatctacagggacctatttgggcaaaaataccgaagactgatggtaaattccatccttctccgaatctcggaggatttggtctgcacaatccaccaccgcaggtgttcatcaagaatacaccagtgcctgcagaccctccagtagaatacgtgcaccagaagtggaattcctacataacccagtactctacgggccagtgtacagtagagatggtgtgggagctgagaaaagagaattcaaagagatggaacccagaaatccagttcaccagtaatttcagtgacagaacaagcataatgtttgcacctaatgaaactggtggatatgtagaagatagattgattggaaccagatatctaactcaaaatctgtaaattctgtgtaaaaattcaaataaagcacttcctggcgcgcaaaatatcctcttgtccttgagtctcattggagggttcgttcgttcgaaccagccaatcaggggagggggaagtgacgcaagttccggtgacgcacatccggtgacgcacatccggtgacgtagttccggtcacgtgcttcctgtcacgtgtttccggtcacgtgacttccggtcatgtgacttccggtgacgtgtttccggcttaactattgggctgaccgcgcgcaatgcgcgtggtcaacctaacagccggaaacacgtcaccggaagtcacatgaccggaagtcacgtgaccggaaacacgtgacaggaagcacgtgaccggaactacgtcaccggatgtgcgtcaccggatgtgcgtcaccggaacttgcgtcacttccgcctagcatgagcggctggttcgaacgaacgaaccctccaatgag

SEQ ID NO: 58 - DNA, 5125 bp, Goose parvovirus
ctcattggagggttcgttcgttcgaaccagccaatcaggggagggggaagtgacgcaagttccggtgacgcacatccggtgacgtagttccggtcacgtgcttcctgtcacgtgcttcctgtcacgtgtttccggtcacgtgacttccggtcatgtgactgcccgtaacgtgtttccggctgttaggttgaccacgcgcatgccgcgcggtcagcccaatagttaagtcgggtactgtcactctaagtcacatgaccggaagtcacgtgaccggaaacacgtgacaggaagcacgtgacaggaagcacgtgaccggaactacgtcaccggatgtgcgtcaccggaacttgcgtcacttccccctcccctgattggctggttcgaacgaacgaaccctccaatgagactcaaggacaagaggatattttgcgcgccaggaagtgacgtgcaatgccaccctatataagccaggaaacttccggtttagttcattcgttactctgctctcagagagaacggacctcaggtcggagagatggcactttctatgcctcttctgatttcttctgataaattctatgaagttatcattagattaccatcggatattgatcaagatgtccccggtctgtctcttaactttgtagaatggctttctaccggagtttgggagcccacgggcatctggaacatggagcatgtgaatctaccgatggtgaccttggcagagaagatcaagaacattttcatacaaagatggaatcagttcaaccaggacgaaacggacttcttctttcaactggaagaaggcagtgagtacattcatcttcattgctgtattgcccagggcaatgtacggtcttttgttctcgggagatatatgtctcagataaaagactctatcataagagatgtatatgaagggaaacaaatcaagatccccgattggtttgctattactaaaaccaagaggggaggacagaataagaccgtgactgcagcatacatactgcattaccttattcctaaaaagcaacctgaactgcaatgggcctttaccaatatgcctttattcactgctgctgctctttgtctgcaaaagcggcaagaattgctggatgcatttcaagaaagtgatttggctgcccctttacctgatcctcaagcatcaactgtggcaccgcttatttccaacagagcggcaaagaattatagcaaccttgttgattggctcattgaaatggggataacatctgagaagcaatggctcactgagaaccgagagagctacagaagctttcaagcaacttcttcaaataatagacaagtgaaagctgcactggaaaatgcccgtgctgaaatgttattgacaaagactgcaaccgattacctgataggaaaagaccctgtcctggacataactaagaatagggtctatcagattctgaaaatgaataactacaaccctcaatacataggaagtatcctgtgcggctgggtgaagagagagttcaacaaaagaaacgccatatggctctacggacctgccaccaccgggaagaccaacattgcagaagctattgcccatgctgtacccttctatggctgtgttaactggactaatgagaactttccttttaatgattgtgttgataaaatgctgatttggtgggaggagggaaaaatgactaataaggttgttgaatctgcaaaagcaattttaggagggtctgctgtccgggtagaccagaaatgtaaaggatctgtttgtattgaacctactcctgtaattattactagtaatactgatatgtgtatgattgttgatggcaactctactacaatggaacatagaataccgttagaggagcgtatgtttcaaatcgtcctatcacataaattggagccttcttttggaaaaatttctaaaaaagaagtcagagaatttttcaaatgggccaatgataatctagttcctgttgtgtctgagttcaaagtccgaacgaatgaacaaactaacttgccagagcccgttcctgaacgagcgaacgagccggaggagcctcctaagatctgggctcctcctactagggaggagttagaagagcttttaagagccagcccagaattgttctcatcagtcgctccaattcctgtgactcctcagaactcccctgagcctaagagaagcaggaacaattaccaggtacgctgcgctttgcatacttatgacaattctatggatgtatttgaatgtatggaatgtgagaaagcaaactttcctgaatttcaacctctaggagaaaattattgtgatgaacatgggtggtatgattgtgctatatgtaaagagttgaaaaatgaacttgcagaaattgagcatgtgtttgagcttgatgatgctgaaaatgaacaataaagatgactcaaagcagatatgtctacttttttagattcttttgaagagtggtatgagactgcagccgcctcgtggcggaatctgaaagctggagcccctcacccaaaaccaaaccagcagactcagtctgtgtctccagccagagaacccgaacgaagagataataaccggggctttgtacttcctggctataagtatcttggccctggtaacggccttgataaagggccacccgttaataaagcggacagcgtcgcgcttgaacacgacaaggcctacgaccaacagcttaaagcgggagacaacccatatataaaattcaatcacgctgaccaggactttatagatagcctccaagacgaccagtcgttcggaggtaatcttggaaaggctgtatttcaggccaaaaaacgtatcttagaaccatttggcctagtagaagatcctgtcaacacggcacctacaaaaaaaaatacagggaagcttaccgaccactacccggtagttaagaagcctaaacttaccgaggaagtcagtgcgggaggtggtagtagtgccgtacaagacggaggagccaccgcggagggcaccgaacctgtggcagcatctgaaatggcagagggaggaggcggagctttgggcgacgcttcagggggtgccgatggagtgggtaatgcctcgggaaattggcattgcgattcccaatggatgggaaacacagtcatcacaaagaccaccagaacctgggtcctgccaagctacaacaaccacatctacaaagcgattaccagtggaacctctcaagatgcaaatgtccagtatgcaggatacagtaccccctgggggtactttgatttcaaccgcttccactgccacttctcccctagagactggcagagacttatcaacaaccattggggaatcagacccaagtctcttaaattcaagatcttcaatgtccaagtcaaagaagtcacaacgcaggatcagacgaagaccattgcaaacaatctcacgtcaacaattcaagtctttacggatgacgagcatcaactcccgtatgtcctgggctcggctacggaaggcaccatgccgccgttcccgtcggatgtctatgccctgccgcagtacgggtattgcaccatgcacaccaaccagaacggtgcacgattcaatgaccggagtgcattctactgcttagaatacttccccagtcagatgctaagaacaggcaacaactttgagttcacgtttgactttgaagaagttcctttccatagcatgttcgctcattcacaggacttagacaggctgatgaaccccttagtggatcagtacctctggaatttcaatgaggtagacagcagcagaaatgctcaatttaaaaaggctgtgaaaggcgcttatggcaccatgggccgcaattggctgccaggacctaaattcctggaccagagagttagggcctatacaggcggaacagataattatgcaaactggaacatctggagtaatggaaacaaggttaatttgaaggacaggcagtacctcctgcaacccggacctgtatcagctactcacacagaagcagaggcttccagcatcccagcccaaaatattttaggtttagctaaagatccatacagatcaggcagcactacagcaggaataagtgatattatggtcacggacgagcaggaagtagcacctacaaacggcgtagggtggaaaccatatggcaagactgtaacgaatgaacaaaacactactacagctcctacaagttcagatctggatgttcttggagctttaccaggaatggtttggcagaacagggatatatatctgcagggacctatttgggcaaaaataccgaagactgatggtaaattccatccttctccgaatctcggaggatttggcctgcacaatccaccaccgcaggtgttcatcaagaatacaccagtgcctgcagaccctccagtagaatacgtgcaccagaagtggaattcctacataacccagtactctacgggccagtgtacagtagagatggtgtgggagctgagaaaagagaattcaaagagatggaacccagaaatccagttcaccagtaatttcagtgacagaacaagcataatgtttgcacctaatgaaactggtggatatgtagaagatagattgattggaaccagatatctaactcaaaatctgtaaattctgtgctcaaaattccttaaattctgtgtaaaaattcaaataaagcacttcctggcgcgcaaaatatcctcttgtccttgagtctcattggagggttcgttcgttcgaaccagccaatcaggggagggggaagtgacgcaagttccggtgacgcacatccggtgacgtagttccggtcacgtgcttcctgtcacgtgcttcctgtcacgtgtttccggtcacgtgacttccggtcatgtgactaccgggacgagtttccggcttaactattgggctgaccgcggcatgcgcgtggtcaacctaacagccggaaacacgttacgggcagtcacatgaccggaagtcacgtgaccggaaacacgtgacaggaagcacgtgacaggaagcacgtgaccggaactacgtcaccggatgtgcgtcaccggaacttgcgtcacttccccctcccctgattggctggttcgaacgaacgaaccctccaatgag

SEQ ID NO: 59 - DNA, 5102 bp, Goose parvovirus
tcattgtagggttcgttcgttcgaacccgccaatcaggggagggggaagtgacgcaagttccggccacgtgtttccggtgacgcacatccggtgacgtacttcctgtcacgtgcttccggtgatgtgtttcctgtcacgtgacttccggtcatgtgacttccggtgacgtatttccggctgttaggttgaccgctggcatgggcgcggtcagcccaatggttaagccggaaatacgtcaccggaagtcacatgaccggaagtcacgtgacaggaaacacatcaccggaagcacgtgacaggaagtacgtcaccggatgtgcgtcaccggaaacacgtggccggaacttgcgtcacttccccctcccctgattggcgggttcgaacgaacgaaccctacaatgagactcaaggacacggggatattttgcgcgccaggaagtgacgttaggggctgccctatataagccagtaagcttccggtttggttcattcgttactctgctctcacagagaacggacctcaggtcggagacatggcactttctaggcctctgcagatttcttctgataaattctatgaagttattattagattaccatcggatattgatcaggatgttcccggtctgtctcttacctttgtagaatggctttctaccggagtttgggagcccacgggcatctggaacatggagcgtgtgaatctaccgatggtgactttggcagagaaaatcaagaatatcttcatacaaaggtggaatcagttcaatcaggacgaaacggacttcttctttcaactggaagaaggcagtgagtacattcatcttcattgctgtattgcccagggcaatgtacggtcttttgttctcgggagatatatgtctcagataaaagactctatcataagagatgtatatgaaggaaaacaaatcaagatccccgattggtttgctatcactaaaaccaagcggggaggacaaaataagaccgtgactgcagcatacatattgcactacctgatacctaaaaaacaacctgagctgcaatgggcctttaccaatatgccattatttagtccggctgctctttgtctgcaaaagcggcaagaattgctggatgcatttcaagaaagcgatttggccgcccctttacctgatcctcaggcatcaactgtggcaccacttatttccaacagagcggcaaagaactatagcaaccttgttgattggctcattgaaatgggcataacatccgagaagcagtggctcactgagaaccgagagagctacagaagttttcaagcaacttcttcaaataatagacaagtgaaagctgcattggaaaatgcccgtgccgaaatgctattaacaaagactgcaaccgattacctgataggaaaagatcctgtcctggacataactaagaacagggtctatcaaattctgaaaatgaataattacaaccctcaatacataggaagtatcctgtgcggctgggtgaagagagagttcaacaaaagaaacgccatatggctctacggacctgccaccaccgggaagaccaacattgcagaagctattgcccatgctgtacccttctatggctgcgttaactggactaacgagaactttccttttaatgattgtgtcgataagatgttgatttggtgggaggagggaaagatgactaacaaggttgtagagtctgcgaaagcaattttggggggctctgctgtccgggtagaccagaaatgtaaagggtctgtttgtattgaacctactcctgtaattattaccagtaacactgacatgtgtatgattgttgatggtaactccactacgatggagcatagaataccactagaggagcgtatgtttcaaatcgtactatcacataaattagagccttctttcggaaaaatctcgaaaaaagaagttagagaattctttaaatgggccaatgataacttagttcctgttgtatctgagttcaaagtccgaacgaatgaacaaaccaacttgccagagcccgttcctgaacgagcgaacgagccggaggagcctcctaagatctgggcccctcctactagggaggagttagaagagcttttaagagccagcccggaactgttctcagcagttgctccgattcctgtgactcctgagaactctcccgagcctaagagaagcaggaacaattaccaggtacgatgtgctttgcatacttatgacaattctatggatgtctttgaatgtatggactgcgaggaggccaattttccggaatttcaacctctgggggaaaactgttgtgatgaacatgggtggtatgactgtactatctgtaaagaattgaaagatgaacttgcagaaattgagcatgtgtttgagcttgatgatgctgaaaatgaacaataaagatgactcaaaacagatatgtctacttttttagattcattcgaagagtggtatgagactgcagccgcctcgtggcggaatctgaaagctggagcccctcacccaaaaccaaaccagcagactcagtctgtgtctccagccagagaacccgaacgaagagatagtaaccggggctttgtacttcctggctataagtatcttggccctggtaacggccttgataaagggccgcccgttaataaggcggacagcgtcgcgcttgaacacgacaaggcctacgaccaacagcttaaagcgggagacaacccttatataaaattcaatcacgctgaccaggactttatagatagcctccaagacgaccggtcgttcggaggtaacctcggaaaggccgtattccaggccaaaaaacgtatcctagagccattcggtctagtagaagactcgatcaacacggcacccgtcaaaaaaaatacagggaaacttactgaccattacccggtggttaagaagcctaaacttaccgaggaggtcagtgcaggaggtggtaccagtgcagtacaagacggaggagccaccgcggagggtaccgaacctgtggcagcatctgaaatggcagagggaggaggcggagctttgggcgacgcttcagggggtgccgatggagtgggtaatgcctcgggaaattggcattgcgattcccaatggatgggaaacacagtcatcacaaaaactacccgaacttgggtcttgccgagctacaataaccacatctacaaagcaattaccagcggaacctctcaggacgcaactgtccagtatgctggatacagtactccctgggggtacttcgatttcaaccgcttccactgccacttctccccgagagactggcaaagacttatcaacaaccattggggaatcagacccaagtcccttaaatttaagatcttcaatgtccaagtcaaagaagtcacaacgcaggatcagacgaagaccattgcaaacaatctcacgtcaacgattcaagtgttcacggatgatgagcatcaactcccgtatgtgctgggctcggctacggaaggcaccatgccgccgttcccgtcggatgtgtatgccctgccgcagtacgggtattgcacaatgcacaccaaccagaacggtgcacgattcaatgaccggagtgcattctactgcttagaatacttccccagtcagatgctaagaacaggcaacaactttgagttcacgtttgactttgaagaagttcctttccacagcatgttcgctcattcacaggacttagacaggctgatgaaccccttagtggatcaatacctctggaatttcaatgaggtagacagcagcagaaatgctcaatttaaaaaagctgtgaaaggcgcttatggcaccatgggccgcaattggctgccaggacctaaactcctggaccagagagttagggcctatacaggcggaacagataattatgcaaactggaacatctggagtaatggaaacaaggtcaatttgaaggacaggcagtacctcttgcaacccggacctgtatcagctactcacacaaaagtagaggcttccagcatcccagcccaaaatattttaggtttagctaaagatccatacagatctggcagcactacagcaggaataagtgatattatggtcacggacgagcaggaagtagcacctacaaatggcgtagggtggaaaccatatggcaagactgtaacgaatgaacaaaacactactacagctcctacgagttcagatcttgatgttcttggagctttaccaggaatggtttggcagaacagagatatatatctacagggacctatttgggctaaaataccaaagaccgatggcaaattccatccttctccgaatctcggaggatttggcctgtacaacccaccaccacaggtcttcatcaagaatacaccggtacctgcagaccctccggtagaatacgtacaccagaagtggaattcttacataacccagtattcttcgggccagtgtacagtagagatggtgtgggagctcagaaaagagaattcaaagcggtggaatccagaaattcagttcaccagcaatttcagtgacagaacaagcataatgtttgcacctaatgaaactggtggatacatagaagatagattgattggaaccagatatctaactcaaaatctgtaatgtctgtaaaaagattcaaataaaacacttcctggcgcgcaaaatatccccgtgtccttgagtctcattgtagggttcgttcgttcgaacccgccaatcaggggagggggaagtgacgcaagttccggccacgtgtttccggtgacgcacatccggtgacgtacttcctgtcacgtgcttccggtgatgtgtttcctgtcacgtgacttccggtcatgtgacttccggtgacgtatttccggcttaaccattgggctgaccgcgcgcatgcgcgcggtcaacctaacagccggaaatacgtcaccggaagtcacatgaccggaagtcacgtgacaggaaacacatcaccggaagcacgtgacaggaagtacgtcaccggatgtgcgtcaccggaaacacgtggccggaacttgcgtcacttccccctcccctgattggcgggttcgaacgaacgaaccctacaatga

SEQ ID NO: 60 - DNA, 5046 bp, Goose parvovirus
tcattggagggttcgttcgttcgaaccagccaatcaggggagggggaagtgacgcaagttccggtgacgcacatccggtgacgtagttccggtcacgtgcttcctgtcacgtgtttccggtcacgtgacttccggtcatgtgacttccggtgacgtgtttccggctgttaggttgaccgcgcgcatgcgcgcggtcagcccaatagttaagccggaaacacgtcaccggaagtcacatgaccggaagtcacgtgaccggaaacacgtgacaggaagcacgtgaccggaactacgtcaccggatgtgcgtcaccggaacttgcgtcacttccccctcccctgattggctggttcgaacgaacgaaccctccaatgagactcaaggacaagaggatattttgcgcgccaggaagtgacgtgcaatgccaccctatataagccaggaaacttccggtttagttcattcgttactctgctctcagagagaacggacctcaggtcggagagatggcactttctaggcctcttcagatttcttctgataaattctatgaagttatcattagattaccatcggatattgatcaagatgtccccggtctgtctcttaactttgtagaatggctttctaccggagtttgggagcccacgggcatctggaacatggagcgtgtgaatctaccgatggtgaccttggcagagaagatcaagaacattttcatacaaagatggaatcagttcaaccaggacgaaacggacttcttctttcaactggaagaaggcagtgagtacattcatcttcattgctgtattgcccagggcaatgtacggtcttttgttctcgggagatatatgtctcagataaaagactctatcataagagatgtatatgaagggaaacaaatcaagatccccgattggtttgctattactaaaaccaagaggggaggacagaataagaccgtgactgcagcatacatactgcattaccttattcctaaaaagcaacctgaactgcaatgggcctttaccaatatgcctttattcactgctgctgctctttgtctgcaaaagcggcaagaattgctggatgcatttcaagaaagtgatttggctgcccctttacctgatcctcaagcatcaactgtggcaccgcttatttccaacagagcggcaaagaactatagcaaccttgttgattggctcattgaaatggggataacatctgagaagcaatggctcactgagaaccgagagagctacagaagctttcaagcaacttcttcaaataatagacaagtgaaagctgcactggaaaatgcccgtgctgaaatgttattgacaaagactgcaaccgattacctgataggaaaagaccctgtcctggacataactaagaatagggtctatcagattctgaaaatgaataactacaaccctcaatacataggaagtatcctgtgcggctgggtgaagagagagttcaacaaaagaaacgccatatggctctacggacctgccaccaccgggaagaccaacattgcagaagctattgcccatgctgtacccttctatggctgtgttaactggactaatgagaactttccttttaatgattgtgttgataaaatgctgatttggtgggaggagggaaaaatgactaataaggttgttgaatctgcaaaagcaattttaggagggtctgctgtccgggtagaccagaaatgtaaaggatctgtttgtattgaacctactcctgtaattattactagtaatactgatatgtgtatgattgttgatggcaactctactacaatggaacatagaataccgttagaggagcgtatgtttcaaatcgtcctatcacataaattggagccttcttttggaaaaatttctaaaaaagaagtcagagaatttttcaaatgggccaatgataatctagttcctgttgtgtctgagttcaaagtccgaacgaatgaacaaactaacttgccagagcccgttcctgaacgagcgaacgagccggaggagcctcctaagatctgggctcctcctactagggaggagttagaagagcttttaagagccagcccagaattgttctcatcagtcgctccaatacctgtgactcctcagaactcccctgagcctaagagaagcaggaacaattaccaggtacgctgcgctttgcatacttatgacaattctatggatgtatttgaatgtatggaatgtgagaaagcaaactttcctgaatttcaacctctaggagaaaattattgtgatgaacatgggtggtatgattgtgctatatgtaaagagttgaaaaatgaacttgcagaaattgagcatgtgtttgaacttgatgatgctgaaaatgaacaataaagatgactcaaagcagatatgtctacttttttagattcttttgaagagtggtatgaaactgcagccgcctcgtggcggaatctgaaagctggagcccctcacccaaaaccaaaccagcagactcagtctgtgtctccagccagagaacccgaacgaagagataataaccggggctttgtacttcctggctataagtatcttggccctggtaacggccttgataaagggccacccgttaataaggcggacagcgtcgcgcttgaacacgacaaggcctacgaccaacagcttaaagcgggagacaacccatatataaaattcaatcacgctgaccaggactttatagatagcctccaagacgaccagtcgttcggaggtaatcttggaaaggctgtatttcaggccaaaaaacgtatcttagaaccatttggcctagtagaagatcctgtcaacacggcacctgcaaaaaaaaatacagggaagcttaccgaccactacccggtagttaagaagcctaaacttaccgaggaagtcagtgcgggaggtggtagtagtgccgtacaagacggaggagccaccgcggagggcaccgaacctgtggcagcatctgaaatggcagagggaggaggcggagctttgggcgacgcttcagggggtgccgatggagtgggtaatgcctcgggaaattggcattgcgattcccaatggatgggaaacacagtcatcacaaagaccaccagaacctgggtcctgccaagctacaacaaccacatctacaaagcgattaccagtggaacctctcaagatgcaaatgtccagtatgcaggatacagtaccccctgggggtactttgatttcaaccgcttccactgccacttctcccctagagactggcagagacttatcaacaaccattggggaatcagacccaagtctcttaaattcaagatcttcaatgttcaagtcaaagaagtcacaacgcaggatcagacgaagaccattgcaaacaatctcacgtcaacaattcaagtctttacggatgacgagcatcaactcccgtatgtcctgggctcggctacggaaggcaccatgccgccgttcccgtcggatgtctatgccctgccgcagtacgggtattgcacaatgcacaccaaccagaacggtgcacgattcaatgaccggagtgcattctactgcttagaatacttccccagtcagatgctaagaacaggcaacaactttgagttcacgtttgactttgaagaagttcctttccacagcatgttcgctcattcacaggacttagacaggctgatgaaccccttagtggatcaatacctctggaatttcaatgaggtagacagcagcagaaatgctcaatttaaaaaggctgtgaaaggcgcttatggcaccatgggccgcaattggctgccaggacctaaattcctggaccagagagttagggcctatacaggcggaacagataattatgcaaactggaacatctggagtaatggaaacaaggttaatttgaaggacaggcagtacctcctgcaacccggacctgtatcagctactcacacaaaagcagaggcttccagcatcccagcccaaaatatgttaggtttagctaaagatccatacagatctggcagcactacagcaggaataagtgatattatggtcacggacgagcaggaagtagcacctacaaacggcgtagggtggaaaccatatggcaagactgtaacgaatgaacaaaacactactacagctcctacaagttcagatctggatgttcttggagctttaccaggaatggtttggcagaacagggatatatatctgcagggacctatttgggcaaaaataccgaagactgatggtaaattccatccttctccgaatctcggaggatttggtctgcacaatccaccaccgcaggtgttcatcaagaatacaccagtgcctgcagaccctccagtagaatacgtgcaccagaagtggaattcctacataacccagtactctacgggccagtgtacagtagagatggtgtgggagctgagaaaagagaattcaaagagatggaacccagaaatccagttcaccagtaatttcagtgacagaacaagcataatgtttgcacctaatgaaactggtggatatgtagaagatagattaattggaaccagatatctaactcaaaatctgtaaattctgtgtaaaaattcaaataaagcacttcctggcgcgcaaaatatcctcttgtccttgagtctcattggagggttcgttcgttcgaaccagccaatcaggggagggggaagtgacgcaagttccggtgacgcacatccggtgacgtagttccggtcacgtgcttcctgtcacgtgtttccggtcacgtgacttccggtcatgtgacttccggtgacgtgtttccggcttaactattgggctgaccgcgcgcatgcgcgcggtcaacctaacagccggaaacacgtcaccggaagtcacatgaccggaagtcacgtgaccggaaacacgtgacaggaagcacgtgaccggaactacgtcaccggatgtgcgtcaccggaacttgcgtcacttccccctcccctgattggctggttcgaacgaacgaaccctccaatga

SEQ ID NO: 61 - DNA, 4101 bp, Goose parvovirus
atggcactttctaggcctctgcagatttcttctgataaattctatgaagttattattagattaccatcggatattgatcaggatgttcccggtctgtctcttacctttgtagaatggctttctaccggagtttgggagcccacgggcatctggaacatggagcgtgtgaatctaccgatggtgactttggcagagaaaatcaagaatatcttcatacaaaggtggaatcagttcaatcaggacgaaacggacttcttctttcaactggaagaaggcagtgagtacattcatcttcattgctgtattgcccagggcaatgtacggtcttttgttctcgggagatatatgtctcagataaaagactctatcataagagatgtatatgaaggaaaacaaatcaagatccccgattggtttgctatcactaaaaccaagcggggaggacaaaataagaccgtgactgcagcatacatattgcactacctgatacctaaaaaacaacctgagctgcaatgggcctttaccaatatgccattatttagtccggctgctctttgtctgcaaaagcggcaagaattgctggatgcatttcaagaaagcgatttggccgcccctttacctgatcctcaggcatcaactgtggcaccacttatttccaacagagcggcaaagaactatagcaaccttgttgattggctcattgaaatgggcataacatccgagaagcagtggctcactgagaaccgagagagctacagaagttttcaagcaacttcttcaaataatagacaagtgaaagctgcattggaaaatgcccgtgccgaaatgctattaacaaagactgcaaccgattacctgataggaaaagatcctgtcctggacataactaagaacagggtctatcaaattctgaaaatgaataattacaaccctcaatacataggaagtatcctgtgcggctgggtgaagagagagttcaacaaaagaaacgccatatggctctacggacctgccaccaccgggaagaccaacattgcagaagctattgcccatgctgtacccttctatggctgcgttaactggactaacgagaactttccttttaatgattgtgtcgataagatgttgatttggtgggaggaggagaagatgactaacaaggttgtagagtctgcgaaagcaattttggggggctctgctgtccgggtagaccagaaatgtaaagggtctgtttgtattgaacctactcctgtaattattaccagtaacactgacatgtgtatgattgttgatggtaactccactacgatggagcatagaataccactagaggagcgtatgtttcaaatcgtactatcacataaattagagccttctttcggaaaaatctcgaaaaaagaagttagagaattctttaaatgggccaatgataacttagttcctgttgtatctgagttcaaagtccgaacgaatgaacaaaccaacttgccagagcccgttcctgaacgagcgaacgagccggaggagcctcctaagatctgggcccctcctactagggaggagttagaagagcttttaagagccagcccggaactgttctcagcagttgctccgattcctgtgactcctgagaactctcccgagcctaagagaagcaggaacaattaccaggtacgatgtgctttgcatacttatgacaattctatggatgtctttgaatgtatggactgcgagacggccaattttccggaatttcaacctctgggggaaaactgttgtgatgaacatgggtggtatgactgtactatctgtaaagaattgaaagatgaacttgcagaaattgagcatgtgtttgagcttgatgatgctgaaaatgaacaataaagatgactcaaaacagatatgtctacttttttagattcattcgaagagtggtatgagactgcagccgcctcgtggcggaatctgaaagctggagcccctcacccaaaaccaaaccagcagactcagtctgtgtctccagccagagaacccgaacgaagagatagtaaccggggctttgtacttcctggctataagtatcttggccctggtaacggccttgataaagggccgcccgttaataaggcggacagcgtcgcgcttgaacacgacaaggcctacgaccaacagcttaaagcgggagacaacccttatataaaattcaatcacgctgaccaggactttatagatagcctccaagacgaccggtcgttcggaggtaacctcggaaaggccgtattccaggccaaaaaacgtatcctagagccattcggtctagtagaagactcgatcaacacggcacccgtcaaaaaaaatacagggaaacttactgaccattacccggtggttaagaagcctaaacttaccgaggaggtcagtgcaggaggtggtaccagtgcagtacaagacggaggagccaccgcggagggtaccgaacctgtggcagcatctgaaatggcagagggaggaggcggagctttgggcgacgcttcagggggtgccgatggagtgggtaatgcctcgggaaattggcattgcgattcccaatggatgggaaacacagtcatcacaaaaactacccgaacttgggtcttgccgagctacaataaccacatctacaaagcaattaccagcggaacctctcaggacgcaactgtccagtatgctggatacagtactccctgggggtacttcgatttcaaccgcttccactgccacttctccccgagagactggcaaagacttatcaacaaccattggggaatcagacccaagtcccttaaatttaagatcttcaatgtccaagtcaaagaagtcacaacgcaggatcagacgaagaccattgcaaacaatctcacgtcaacgattcaagtgttcacggatgatgagcatcaactcccgtatgtgctgggctcggctacggaaggcaccatgccgccgttcccgtcggatgtctatgccctgccgcagtacgggtattgcacaatgcacaccaaccagaacggtgcacgattcaatgaccggagtgcattctactgcttagaatacttccccagtcagatgctaagaacaggcaacaactttgagttcacgtttgactttgaagaagttcctttccacagcatgttcgctcattcacaggacttagacaggctgatgaaccccttagtggatcaatacctctggaatttcaatgaggtagacagcagcagaaaagctcaatttaaaaaagctgtgaaaggcgcttatggcaccatgggccgcaattggctgccaggacctaaactcctggaccagagagttagggcctatacaggcggaacagataattatgcaaactggaacatctggagtaatggaaacaaggtcaatttgaaggacaggcagtacctcttgcaacccggacctgtatcagctactcacacaaaagtagaggcttccagcatcccagcccaaaatattttaggtttagctaaagatccatacagatctggcagcactacagcaggaataagtgatattatggtcacggacgagcaggaagtagcacctacaaatggcgtagggtggaaaccatatggcaagactgtaacgaatgaacaaaacactactacagctcctacgagttcagatcttgatgttcttggagctttaccaggaatggtttggcagaacagagatatatatctacagggacctatttgggctaaaataccaaagaccgatggcaaattccatccttctccgaatctcggaggatttggcctgtacaacccaccaccacaggtcttcatcaagaatacaccggtacctgcagaccctccggtagaatacgtacaccagaagtggaattcttacataacccagtattcttcgggccagtgtacagtagagatggtgtgggagctcagaaaagagaattcaaagcggtggaatccagaaattcagttcaccagcaatttcagtgacagaacaagcataatgtttgcacctaatgaaactggtggatacatagaagatagattgattggaaccagatatctaactcaaaatctgtaa

SEQ ID NO: 62 - DNA, 4101 bp, Goose parvovirus
atggcactttctaggcctcttcagatttcttctgataaattctatgaagttattattagattaccatcggatattgatcaagatgtccccggtctgtctcttaactttgtagaatggctttctaccggagtttgggagcccacgggcatctggaacatggagcatgtgaatctaccgatggtgaccttggcagagaagatcaagaacattttcatacaaagatggaatcagttcaaccaggacgaaacggacttcttctttcaactggaagaaggcagtgagtacattcatcttcattgctgtattgcccagggcaatgtacggtcttttgttctcgggagatatatgtctcagataaaagactctatcataagagatgtatatgaagggaagcaaattaagatccccgattggtttgctattactaaaaccaagagcggaggacagaataagaccgtgactgcaacatacatactgcattaccttattcctaaaaagcaacctgaactgcaatgggcctttaccaatatgcctttatttactgctgctgctctttgtctgcaaaagcggcaagaattgctggatgcatttcaagagagtgatttggctgcccctttacctgatcctcaagcatcaactgtggcaccgcttatttccaacagagcggcaaagaactatagcaaccttgttgattggctcattgaaatgggcataacatctgagaagcaatggctcactgagaaccgagagagctacagaagctttcaagcaacttcttcaaataatagacaagtgaaagctgcactggaaaatgcccgtgctgaaatgttattaacaaagactgcaactgattacctgataggaaaagaccctgtcctggacataattaagaatagggtctatcaaattctgaaaatgaataactacaaccctcaatacgtaggaagtatcctgtgcggctgggtgaagagagagttcaacaaaagaaacgccatatggctctacggacctgccaccaccgggaagaccaacattgcagaagctattgcccatgctatacccttctatggctgtgttaactggactaatgagaactttccttttaatgattgtgttgataagatgttgatttggtgggaggagggaaaaatgactaataaggttgttgaatctgcaaaagcaattttgggagggtctgctgtccgggtagaccagaaatgtaaaggatctgtttgtattgaaactactcctgtaattattactagtaatactgacatgtgtatgattgttgatggcaactctactacaatggaacatagaataccattagaggagcgtatgtttcaaattgtcctatcacataaattggaaccttcttttggaaaaatttctaaaaaagaagtcagagaatttttcaaatgggccaatgacaatctagttcctgttgtgtctgagttcaaagtccgaacgaatgaacaaaccaacttgccagagcccgttcctgaacgagcgaacgagccgaaggagcctcctaagatctgggctcctcctactagggaggagttagaagagcttttaagagccagcccagaattgttctcatcagtcgctccaattcctgtgactcctcagaactcccctgagcctaagagaagcaggaacaattaccaggtacgctgcgctttgcatacttatgacaattctatggatgtatttgaatgtatagaatgtgagaaagcaaactttcctgaatttcaacctctgggagaaaattattgtgatgaacatgggtggtatgattgtgctatatgtaaagagttgaaaaatgaacttgcagaaattgagcatgtgtttgagcttgatgatgctgaaaatgaacaataaagatgactcaaagcagatatgtctacttttttagattcttttgaagagtggtatgagactgcagccgcatcttggcggcatctgaaagctggagcccccaagccaaaaccaaaccaacaatctcagtctgtgtctacagacagaaaaccccaacgaaaagacaataataggggctttgtacttcctggctataagtatcttgggcctggtaacggccttgataaagggccacctgtcaataaagcggacagcgtcgcgcttgagcacgataaagcgtacgaccagcagctcaaggcaggagacaacccctatataaaatttaatcacgcagatcaagaatttatagatagcctccaagacgaccggtcgttcggaggcaacctcggaaaagccgtattccaagctaaaaaaagaattctagagcctttaggcctagtagaagaacctgtaaacacggctcctgctaaaaagagtagtggaaaactaacagatcactaccctatagtaaagaagcctaaattatctgaagaaaactctccttcacctagtaatagtggaggagaagcaagtgcagctgccaccgaaggctccgaacctgtggcagcacctaacatggcagagggaggaagcggagctatgggcgactctgcagggggtgccgatggagtgggtaatgcctcaggaaattggcattgcgattcccaatggctgggagacacagtcatcacaaagaccaccagaacctgtgtcctgccaagctacaacaaccacatctacaaagcgattaccagtggaacctctcaagatgcaaatgtccagtatgcaggatacagtaccccctgggggtacttcgatttcaacagatttcactgccacttctctccaagagactggcagagacttatcaacaaccattggggaatcagacccaagtctcttaaattcaagatcttcaatgtccaagtcaaagaagtcacaacgcaggatcagacgaagaccattgcaaacaatctcacgtcaacaattcaagtctttacggatgacgagcatcaactcccgtatgtcctgggctcggctacggaaggcaccatgccgccgttcccgtcggatgtctatgccctgccgcagtacgggtactgcaccatgcacaccaaccagaatggagcacggttcaatgaccgtagtgcattctactgcttagagtacttccctagtcagatgctaagaacaggcaacaactttgagttcacatttgactttgaagaagttcctttccatagcatgttcgctcattcacaggacttagacaggctgatgaaccccctagtggatcaatacctctggaatttcaatgaggtagacagcaacagaaatgctcaatttaaaaaggctgtgaaaggcgcttatggcaccatgggccgcaattggctgccaggacctaaattcctggaccagagagttagggcctatccaggcggaacagataattatgcaagctggaacatctggagtaatggaaacaaggttaatttgaaggacaggcagtacctcctgcaacctggacctgtatcagctactcacacagaagcagaggcttccagcatcccagcccaaaatattttaggtttagctaaagatccatacagatctgggagcactgcagcaggaataagtgatattatggtcacggacgagcaggaagtagcacctacaaacggcgtagggtggaaaccatatggcaagactgtaacgaatgaacaaaacactactagagctcctacgagttcagatcttgatgttcttggagctttaccaggaatggtttggcagaacagagatatatatctacagggtcctatatgggctaaaatacccaaaacagatgggaaatttcatccttctccaaacctgggaggttttggtctccataatccacctccccaggtctttattaaaaatacccctgttcctgcagatcctccactagagtatgtaaatcaaaagtggaattcttacattacacagtattcaacagggcagtgtactgtagaaatggtctgggaactcagaaaagaaaactccaagagatggaaccctgagatccaatttaccagtaactttggaaatagaacaagtactatgtttgctccaagtgagactggaggttatgtagaagataggctgattggtaccagatatttgactcagaatctgtaa

SEQ ID NO: 63 - DNA, 4129 bp, Goose parvovirus
tcggagagatggcactttctaggcctcttcagatttcttctgacaaattctatgaagttatcatcaggctaccctcggatattgatcaagatgtgcctggtttgtctcttaactttgtagaatggctttctacgggggtctgggagcccaccggaatatggaatatggagcatgtgaatctccccatggttactctggcagacaaaatcaagaacattttcatccagagatggaaccaattcaatcaggacgaaacggatttcttctttcaattggaagaaggcagtgagtacatccatctgcattgctgcattgcccaggggaatgtccgatcttttgttctggggagatacatgtctcaaattaaagactcaattctgagagatgtgtatgaagggaaacaggtaaaagtcccggattggttttctataactaaaaccaaacggggagggcaaaataagaccgtgactgctgcttatattctgcattacctgattcctaaaaaacaaccggaattacaatgggcttttaccaatatgccccttttcactgctgctgctttatgcctccaaaagaggcaagagttactggatgcttttcaggaaagtgagatgaatgctgtagtgcaggaggatcaagcttcaactgtagctccccttatttccaacagagcagcaaagacctatagtaatctggttgattggctcattgagatgggtatcacctctgaaaaacagtggctaactgaaaataaagagagctaccggagctttcaggctacatcttcaaacaacagacaagtaaaagcagcacttgaaaatgcccgagcagaaatgctactaacaaaaactgccacagactatttgattggaaaagacccagttctggacattactaaaaatcggatctatcaaattctgaagttgaataactataaccctcaatatgtagggagcatcctatgcggatgggtgaaaagagaattcaacaaaagaaatgccatatggctctacggacctgcgaccaccggaaagaccaacatagccgaggctattgcccatgctgtacccttctatggctgtgttaactggactaatgagaactttcctttcaatgactgcgttgataaaatgcttatatggtgggaggagggaaaaatgaccaataaagtagtggaatccgcaaaagcgatactgggggggtctgctgtacgagttgatcaaaagtgtaaggggtctgtttgtattgaacctactcctgtaataattaccagtaatactgatatgtgcatgattgtggatggaaattctactacaatggaacacagaattcctttggaggaaagaatgttccagattgttctttcccataagctggaaggaaattttggaaaaatttcaaaaaaggaggtaaaagagtttttcaaatgggccaatgataatcttgttccagtagtttctgagttcaaagtccctacgaatgaacaaaccaaacttactgagcccgttcctgaacgagcgaatgagccttccgagcctcctaagatatgggctccacctactagggaggagctagaggagatattaagagcgagccccgagctctttgcttcagttgctcctctgccttccagtccggagagatctcctgagagaaagaaaacccgtcgggactatcaggtacgctgtgctatgcacagtttagataactctatgaatgtttttgaatgcctggagtgtgaaagagctaattttcctgaatttcagagtctgggtgaaaacttttgtaatcaacatgggtggtatgattgtgcattctgtaatgaactgagagatgacatgaatgaaattgaacatgtttttgctattgatgatatggagaatgaacaataaagatgattcaaaatagctatgtctacttttttagagaaatttgaagactggtatgagactgcagccgcatcttggcggcatttgaaagctggagcccccaagccaaaatcaaaccaacaatctcagtctgtgtctacagacagaaaaccccaacgaaaagacaataataggggctttgtacttcctggctataagtatcttgggcctggtaacggccttgataaagggccacctgtcaataaagcggacagcgtcgcgcttgagcacgataaagcgtacgaccagcagctcaaggcaggagacaacccctatataaaatttaatcacgcagatcaagaatttatagataatctgcaaggtgatacctcctttggaggcaacctcggaaaagccgtattccaagctaaaaaaagaattctagagcctttaggcctagtagaagaacctgtaaacacggctcctgctaaaaagagtagtggaaaactaacagatcactaccctatagtaaagaagcctaaattatctgaagaaaactctccttcacctagtaatagtggaggagaagcaagtgcagctgccaccgaaggctccgaacctgtggcagcacctaacatggcagagggaggaagcggagctatgggcgactctgcagggggtgccgatggagtgggtaatgcctcaggaaattggcattgcgattcccaatggctgggagacacagtcatcacaaagaccaccagaacctgggtcctgccaagctacaacaaccacatctacaaagcgattaccagtggaacctctcaagatgcaaatgtccagtatgcaggatacagtaccccctgggggtactttgatttcaacagattccactgccacttctctccaagagactggcagagacttatcaacaaccattggggaatcagacccaagtctcttaaattcaagatcttcaatgtccaagtcaaagaagtcacaacgcaggatcagacgaagaccattgcaaacaatctcacgtcaacaattcaagtctttacggatgacgagcatcaactcccgtatgtcctgggctcggctacagaaggcaccatgccgccgttcccgtcggatgtctatgccctgccgcagtacgggtactgcaccatgcacaccaaccagaatggagcacggttcaatgaccgtagtgcattctactgcttagagtacttccctagtcagatgctaagaacaggcaacaactttgagttcacatttgactttgaagaagttcctttccatagcatgttcgctcattcacaggacttagacaggctgatgaaccccctagtggatcaatacctctggaatttcaatgaggtagacagcaacagaaatgctcaatttaaaaaggctgtgaaaggcgcttatggcaccatgggccgcaattggctgccaggacctaaattcctggaccagagagttagggcctatccaggcggaacagataattatgcaaactggaacatctggagtaatggaaacaaggttaatttgaaggacaggcagtacctcctgcaacctggacctgtatcagctactcacacagaagcagaggcttccagcatcccagcccaaaatattttaggtttagctaaagatccatacagatctggcagcactgcagcaggaataagtgatattatggtcacggacgagcaggaagtagcacctacaaacggcgtagggtggaaaccatatggcaagactgtaacgaatgaacaaaacactactagagctcctacgagttcagatcttgatgttcttggagctttaccaggaatggtttggcagaacagagatatatatctacagggtcctatatgggctaaaatacccaaaacagatgggaaatttcatccttctccaaacctgggaggttttggtctccataatccacctccccaggtctttattaaaaatactcctgttcctgcagatcctccactagagtatgtaaatcagaagtggaattcttacattacacagtattcaacagggcagtgtactgtagaaatggtctgggaactcagaaaagaaaactccaagagatggaaccctgagatccaatttaccagtaactttggaaatagaacaagtactatgtttgctccaagtgagactggaggctatgtagaagataggctgattggtaccagatatttgactcagaatctgtaaattctgtgtaaaaattcaaa

SEQ ID NO: 64 - DNA, 4126 bp, Goose parvovirus
gagagatggcactttctaggcctcttcagatttcttctgacaaattctatgaagttatcatcaggctaccctcggatattgatcaagatgtgcctggtttgtctcttaactttgtagaatggctttctacgggggtctgggagcccaccggaatatggaatatggagcatgtgaatctccccatggttactctggcagacaaaatcaagaacattttcatccagagatggaaccaattcaatcaggacgaaacggatttcttctttcaattggaagaaggcagtgagtacatccatctgcattgctgcattgcccaggggaatgtccgatcttttgttctggggagatacatgtctcaaattaaagactcaattctgagagatgtgtatgaagggaaacaggtaaaaatcccggattggttttctataactaaaaccaaacggggagggcaaaataagaccgtgactgctgcttatattctgcattacctgattcctaaaaaacaaccggaattacaatgggcttttaccaatatgccccttttcactgctgctgctttatgcctccaaaagaggcaagagttactggatgcttttcaggaaagtgagatgaatgctgtagtgcaggaggatcaagcttcaactgtagctccccttatttccaacagagcagcaaagaactatagcaatctggttgattggctcattgagatgggtatcacctctgaaaaacagtggctaactgaaaataaagagagctaccggagctttcaggctacatcttcaaacaacagacaagtaaaagcagcacttgaaaatgcccgagcagaaatgctactaacaaaaactgccacagactatttgattggaaaagacccagttctggacattactaaaaatcggatctatcaaattctgaagttgaataactataaccctcaatatgtagggagcatcctatgcggatgggtgaaaagagaattcaacaaaagaaatgccatatggctctacggacctgtgaccaccggaaagaccaacatagccgaggctattgcccatgctgtacccttctatggctgtgttaactggactaatgagaactttcctttcaatgattgtgttgataaaatgcttatatggtgggaggagggaaaaatgaccaataaagtagtggaatccgcaaaagcgatactgggggggtctgctgtacgagttgatcaaaagtgtaaggggtctgtttgtattgaacctactcctgtaataattaccagtaatactgatatgtgcatgattgtggatggaaattctactacaatggaacacagaattcctttggaggaaagaatgttccagattgttctttcccataagctggaaggaaatcttggaaaaatttcaaaaaaggaggtaaaagagtttttcaaatgggccaatgataatcttgttccagtagtttctgagttcaaagtccctacgaatgaacaaaccaaacttactgagcccgttcctgaacgagcgaatgagccttccgagcctcctaagatatgggctccacctactagggaggagctagaggagatattaagagcgagccccgagctctttgcttcagttgctcctctgccttccagtccggagagatctcctgagagaaagaaaacccgtcgggactatcaggtacgctgtgctatgcacagtttagataactctatgaatgtttttgaatgcctggagtgtgaaagagctaattttcctgaatttcagagtctgggtgaaaacttttgtaatcaacatgggtggtatgattgtgcattctgtaatgaactgagagatgaacatgaagaaattgaacatgttttcgctattgatgatatggagaatgaacaataaagatgattcaaaatagctatgtctaattttttagagaaatttgaagactggtatgagactgcagccgcatcttggcggcatttgaaagctggagcccccaagccaaaatcaaaccaacaatctcagtctgtgtctacagacagaaaaccccgacgaaaagacaataataggggctttgtacttcctggctataagtatcttgggcctggtaacggccttgataaagggccacctgtcaataaagcggacagcgtcgcgcttgagcacgataaagcgtacgaccagcagctcaaggcaggagacaacccctatataaaatttaatcacgcggatcaagaatttatagataatctgcaaggtgatacctcctttggaggcaacctcggaaaagccgtattccaagctaaaaaaagaattctagagcctttaggcctagtagaagaacctgtaaacacggctcctgctaaaaagagtagtggaaaactaacagatcactaccctatagtaaagaagcctaaattatctgaagaaaactctccttcacctagtaatagtggaggagaagcaagtgcagctgccaccgaaggctccgaacctgtggcagcacctaacatggcagagggaggaagcggagctatgggcgactctgcagggggtgccgatggagtgggtaatgcctcaggaaattggcattgcgattcccaatggctgggagacacagtcatcacaaagaccaccagaacctgggtcctgccaagctacaacaaccacatctacaaagcgattaccagtggaacctctcaagatgcaaatgtccagtatgcaggatacagtaccccctgggggtactttgatttcaacagattccactgccacttctctccaagagactggcagagacttatcaacaaccattggggaatcagacccaagtctcttaaattcaagatcttcaatgtccaagtcaaagaagtcacaacgcaggatcagacgaagaccattgcaaacaatctcacgtcaacaattcaagtctttacggatgacgagcatcaactcccgtatgtcctgggctcggctacagaaggcaccatgccgccgttcccgtcggatgtctatgccctgccgcagtacgggtactgcaccatgcacaccaaccagaatggagcacggttcaatgaccgtagtgcattctactgcttagagtacttccctagtcagatgctaagagcaggcaacaactttgagttcacatttgactttgaagaagttcctttccatagcatgttcgctcattcacaggacttagacaggctgatgaaccccctagtggatcaatacctctggaatttcaatgaggtagacagcaacagaaatgctcaatttaaaaaggctgtgaaaggcgcttatggcaccatgggccgcaattggctgccaggacctaaattcctggaccagagagttagggcctatccagccggaacagataattatgcaaactggaacatctggagtaatggaaacaaggttaatttgaaggacaggcagtacctcctgcaacctggacctgtatcagctactcacacagaagcagaggcttccagcatcccagcccaaaatattttaggtttagctaaagatccatacagatctggcagcactgcagcaggaataagtgatattatggtcacggacgagcaggaagtagcacctacaaacggcgtagggtggaaaccatatggcaagactgtaacgaatgaacaaaacactactagagctcctacgagttcagatcttgatgttcttggagctttaccaggaatggtttggcagaacagagatatatatctacagggtcctatatgggctaaaatacccaaaacagatgggaaatttcatccttctccaaacctgggaggttttggtctccataatccacctccccaggtctttattaaaaatactcctgttcctgcagatcctccactagagtatgtaaatcagaagtggaattcttacattacacagtattcaacagggcagtgtactgtagaaatggtctgggaactcagaaaagaaaactccaagagatggaaccctgagatccaatttaccagtaactttggaaatagaacaagtactatgtttgctccaagtgagactggaggctatgtagaagataggctgattggtaccagatatttgactcagaatctgtaaattctgtgtaaaaattcaaa

SEQ ID NO: 65 - DNA, 2523 bp, Mouse adeno-associated virus
tttaagtgggcggagctgaatccagtcccgccccctcacgtgttcagagtgcctcgggtcaatgacgctgggtataaaaggccagagactcccgctcggtcgtcatacgcgacggagagaccgagcggagaggagccttctgccaaacgcccgaggtacgaacacaaaccagtggacaatgggagggaggagaaatgtacgctggactcgtggttggaggggaaccccactcccgctcccatggtcgtgcacgacttgatggactcgagtggttctgtatttgatatgacggttcgggagtgtcccgattcaaataaagagcaatgatttactcaaagtagtcatgtctttctttgattggttaggtaaacagtacgctcaaggagctgctgaattctgggatttgaagtccggtcctcctgcaccaaaaaaggcgcgaaaggacggatcagccggattcaatttccctgggcacaaatacctgggtcctggcaattcattggatcgcggagatcccgtggacgctgacgacgccgctgctcaaaagcacgaccagtcgtaccaagagcagcttgaggcgggagacaatccctacctcaagtacaaccacgccgaccgcgagttccaggaggcgttgaaggacgacacctcctttgaaggaaatctcgcgagaggactctttgaggccaagaagctcgtggcagagcctcttggtctcgtggaaccagaactggcgccacccagtggccgtaaacgaccggtgcaatcgagtcaagagtctggttactcgagtagccaagacaagcggcccaacctcgacgtagacgaggaggaccgtgagttcgctgccgctgcagcggagaccgaaactggaagcgctccccccaccggcaatttgggacctggtacgatggctggaggcggtagcgcgccaatcgacgacggctcgtatggtgccgatggagtgggcaatgcctcgggagattggcattgcgattccacatggctggacaactgtgtcatcacccgaaccactcggacctggaatctgccaacctacaacaaccacatctacaaacgactcaacggaacgacctccggagaccaaagctacttcggattcagcaccccctggggatactttgacttcaaccgcttccactgtcatttctcccctcgagactggcaaagactcatcaacaataactggggactccgaccaaagagcctacggttcaaaatctttaacattcaagttaaagaagtcacgacgcaagactcaacgaagatcatctccaataaccttaccagcacggttcaggtatttgcggacacggagtaccagctcccgtacgtgattggatcggctcacgaaggatgtctgcctcctttcccggctgacgtgttcatgctgccgcagtatggatactgtactcgacaagacggaaacagcaacaatccgaccccgagaagcgccttctattgtttggagtactttcccagcaagatgctaagaactgggaacagttttgaatttacatataactttgagaaggtgccgttccacagcatgtgggctcacaaccagagtctggatcgattgatgaatccattgattgatcagtacctgtactaccttgatgtcacttcgagtaccgggtttacctatcaaaaaggagttcacacgaacttgcccgaacaagagcgcaactggctgccgggaccaggaattcgaaatcaagcttggtttaattctgcaactggaaacaacccactaactggtacctggcaatattccaacaaatacgtacttgaaaaccgtgcttcgaagattgctcctggacctgccatgggaattgaatcaacaaaattcgacgggaacggaatcatcttttctaaagaatacatcaccaatgtaaatacagccaatccgaatcaagtaaacatcacacgcgagaccgaaataaactcaacgaaccccttggctggaggatctctcggagcccacgctaataattcacaaaacacaacaacggcaccgacgctagaccacaccaacgtcatgggtgtgtttccgggtagtgtctggcaagacagagacatttaccttcaaggacaaatctgggccaagattccccacacagacggacatttccacccttctcctctcatgggaggatttggactgaagaacccgcctcctcaaattctgatcaaaaacacacctgttccggctgacccaccaactgaattcaatgcgaacaaaatctcttctttcatcactcaatactcaaccggacaagttacagtggaaatggaatgggaacttcagaaagaaacctccaaaagatggaatccagaaatccagtacagcgacgactcgtcttcgacgtctggctccattctgcactttgctccggatgatgttggaaactacaaagagttccgctctatcggaactcgttaccttacccgtcctctgtaaacctttcctccttgtgtgtaaatacttccttcaataaa

SEQ ID NO: 66 - DNA, 5132 bp, Barbarie duck parvovirus
ctcattggagggttcgttcgttcgaaccagccaatcaggggaggggggaagtgacgtaagttccggtcacgtgcttccggtcacgtgcttccggtcatgtgacttccggtcatgtgacttccggtgacgtgtctcctgtcacgtgacttccggtgacgcacttcctttgatgacgtatttccggttgtcaaggctgatcgggcgcatgcgcccgatctgccatgaaaattaaaccggaaatacgtcatcaaaggaagtgcgtcaccggaagtcacgtgacaggagacacgtcaccggaagtcacatgaccggaagtcacatgaccggaagcacgtgaccggaagcacgtgaccggaacttacgtcacttcccccctcccctgattggctggttcgaacgaacgaaccctccaatgagactcaaggacagcaggactttttgcgcgccaggaaatggtgcaatctaggagagtgtataaggagagctttttccggttgcattcattcgttgctctgctctcacagagaacggacctcaggtcaggaaaatggcattttctaggcctcttcagatttcttctgacaaattctatgaagttatcatcaggctaccctcggatattgatcaagatgtgcctggtttgtctcttaactttgtagaatggctttctacgggggtctgggagcccaccggaatatggaatatggagcatgtgaatctccccatggttactctggcagacaaaatcaagaacattttcatccagagatggaaccaattcaatcaggacgaaacggatttcttctttcaattggaagaaggcagtgagtacatccatctgcattgctgtattgcccaggggaatgtccgatcttttgttctggggagatacatgtctcaaattaaagactcaattctgagagatgtgtatgaagggaaacaggtaaaaatcccggattggttttctataactaaaaccaaacggggagggcaaaataagaccgtgactgctgcttatattctgcattacctgattcctaaaaaacaaccggaattacaatgggcttttaccaatatgccccttttcactgctgctgctttatgcctccaaaagaggcaagagttactggatgcttttcaggaaagtgagatgaatgctgtagtgcaggaggatcaagcttcaactgcagctccccttatttccaacagagcagcaaagaactatagcaatctggttgattggctcattgagatgggtatcacctctgaaaaacagtggctaactgaaaataaagagagctaccggagctttcaggctacatcttcaaacaacagacaagtaaaagcagcacttgaaaatgcccgagcagaaatgctactaacaaaaactgccacagactatttgattggaaaagacccagttctggacattactaaaaatcggatctatcaaattctgaagttgaataactataaccctcaatatgtagggagcgtcctatgcggatgggtgaaaagagaattcaacaaaagaaatgccatatggctctacggacctgcgaccaccggaaagaccaacatagccgaggctattgcccatgctgtacccttctatggctgtgttaactggactaatgagaacttcccatttaatgactgcgttgataaaatgcttatatggtgggaggagggaaaaatgaccaataaagtagtggaatccgcaaaagcgatactgggggggtctgctgtacgagttgatcaaaagtgtaaggggtctgtttgtattgaacctactcctgtaataattaccagtaatactgatatgtgcatgattgtggatggaaattctactacaatggaacacagaattcctttggaggaaagaatgttccagattgttctttcccataagctggaaggaaattttggaaaaatttcaaaaaaggaggtaaaagagtttttcaaatgggccaatgataatcttgttccagtagtttctgagttcaaagtccctacgaatgaacaaaccaaacttactgagcccgttcctgaacgagcgaatgagccttccgagcctcctaagatatgggctccacctactagggaggagctagaggagatattaagagcgagccctgagctctttgcttcagttgctcctctgccttccagtccggacacatctcctaagagaaagaaaacccgtggggagtatcaggtacgctgtgctatgcacagtttagataactctatgaatgtttttgaatgcctggagtgtgaaagagctaattttcctgaatttcagagtctgggtgaaaacttttgtaatcaacatgggtggtatgattgtgcattctgtaatgaactgaaagatgacatgaatgaaattgaacatgtttttgctattgatgatatggagaatgaacaataaaggtgattcaaaatagctatgtctacttttttagagaaatttgaagactggtatgagactgcagccgcatcttggcggcatttgaaagctggagcccccaagccaaaatcaaaccagcaatctcagtctgtgtctacagacagaaaaccccaacgaaaagacaataataggggctttgtacttcctggctataagtatgttgggcctggtaacggccttgataaagggccacctgtcaataaagcggacagcgtcgcgcttgagcacgataaagcgtacgaccagcagctcaaggcaggagacaacccctatataaaatttaagcacgcagatcaagaatttatagataatctgcaaggtgatacctcctttggaggcaacctcggaaaagccgtattccaagctaaaaaaagaattctagagcctttaggcctagtagaagaacctgtaaacatggctcctgctaaaaagagtagtggaaaactaacagatcacgaccctatagtaaagaagcctaaattatctgaagaaaactctccttcacctagtaatagtggaggagaagcaagtgcagctgccaccgaaggctccgaacctgtggcagcacctaacatggcagagggaggaagcggagctatgggcgactctgcagggggtgccgatggagtgggtaatgcctcaggaaattggcattgcgattcccaatggctgggagacacagtcattaccaagactacaagaacctgggtcctgccaagctacaacaaccacatgtaccaagccatcacaagcggaacaaacccagactcaaatacccaatatgctggatacagcaccccctgggggtactttgatttcaacagattccactgccatttctctccaagagactggcagagactcatcaacaaccattgggggattagaccgaaagcactcaaattcaagatattcaatgtgcaagttaaagaagtcacgacgcaagaccagacaaagactattgctaacaaccttacctctacaatccagatattcacggataatgaacaccagctgccctatgttctgggctcggccacggaggggacgatgccaccgttcccctcagatgtgtatgccttgccccagtacggctactgcacaatgcacaccaaccagagtggagcgagattcaatgacagaagtgccttctattgcttagagtacttccccagtcagatgctgagaacagggaataattttgaattcagttttgagtttgaagaagttcccttccatagcatgttcgctcattcacaggatttagacaggctaatgaatcctctcctagatcagtacctgtggaatttctctgaggttaatggtggcaggaatgcacagttcaaaaaagctgtgaaaggagcatttggtgcaatggggagaaattggcttccaggacccaaacttctagaccaaagggtaagagcatacagtggaggaacagataactatgcgaactggtcaatctggagtaaaggaaacaaagtttttcttaaagacagagagtatctcctgcaaccaggtccagtagctactacacatacagaagatcaggcttccagtgtaccggctcaaaacataataggaattgcaaaagacccctacaggtcaggcagtactctggcaggaatttcagacatcatggtaacagatgagcaagaaatagcaccaactaacggtgtagggtggagaccttatggattgaccgtaaccaatgaacaaaacacaacaacagctcctacaaatgctgagctagaagtactgggagcactacctggcatggtctggcagaacagagatatttacctgcagggtcctatatgggctaaaatacccaaaacagatgggaaaccccatccttctccaaacctgggaggttttggtctccataatccacctccccaggtctttattaaaaatactcctgttcctgcagatcctccactagagtatgtaaatcagaagtggaattcttacattacacagtattcaacagggcagtgtactgtagaaatggtctgggaactcagaaaagaaaactccaagagatggaaccctgagatccaatttaccagtaactttggaaatagaacaagtactatgtttgctccaaatgagactggaggctatgtagaagataggctgattggtaccaggtatttgactcagaatctgtaaatttctgtattcttttgattttaaataaaccatttcctggcgcgcaaaaagtcctgctgtccttgagtctcattggagggttcgttcgttcgaaccagccaatcaggggaggggggaagtgacgtaagttccggtcacgtgcttccggtcacgtgcttccggtcatgtgacttccggtcatgtgacttccggtgacgtgtctcctgtcacgtgacttccggtgacgcacttcctttgatgacgtatttccggttgtcaaggctgatcgggcgcatgcgcccgatctgccatgaaaattaaaccggaaatacgtcatcaaaggaagtgcgtcaccggaagtcacgtgacaggagacacgtcaccggaagtcacatgaccggaagtcacatgaccggaagcacgtgaccggaagcacgtgaccggaacttacgtcacttcccccctcccctgattggctggttcgaacgaacgaaccctccaatga

SEQ ID NO: 67 - DNA, 4265 bp, Muscovy duck parvovirus
tttccggttgcattcattcgttgctctgctctcacagagaacggacctcaggtcaggaaaatggcattttccaggcctcttcagatttcttctgacaaattctatgaagttatcatcaggttaccctcggatattgatcaagatgtgcctggtttgtctcttaactttgtagaatggctttctacgggggtctgggagcccaccggaatatggaatatggaacatgtgaatctccccatggttactctggcagacaaaatcaagaacattttcatccagagatggaaccaattcaatcaggacgaaacggatttcttctttcagttggaagaaggcagtgagtacatccatctgcattgctgtattgctcaggggaatgtccgatcttttgttctggggagatacatgtctcaaattaaagactcaattctgagagatgtctatgaggggaaacaggtaaaaataccggattggttttctataactaaaaccaaacggggagggcaaaataagactgtgactgctgcttatattctgcattacctgattcctaaaaaacaaccagaattacaatgggcttttaccaatatgccccttttcactgctgctgctttatgcctccaaaagaggcaagagttactggatgcttttcaggaaagtgagatgaatgctgtagtgcaggaggatcaagcttcaactgtagctccccttatttccaacagagcagcaaagaactatagcaatctggttgattggctcattgagatgggtatcacctctgaaaaacagtggctaactgaaaataaagagagctaccggagctttcaggctacatcttcaaacaacagacaagtaaaagcagcacttgaaaatgcccgagcagaaatgctactaacaaaaactgccacagactatttgattggaaaagacccagttctggacattactaaaaatcggatctatcaaattctgaagttcaataactataaccctcaatatgtagggagcatcttatgcggatgggtgaaaagagaattcaacaaaagaaatgccatatggctctacggacctgcgaccaccggaaagaccaacatagccgaggctattgcccatgctgtacccttctatggctgtgttaactggactaatgagaacttcccatttaatgactgtgttgataaaatgcttatatggtgggaggagggaaaaatgaccaataaagtagtggaatccgcaaaagcgatactgggggggtctgctgtacgggttgatcaaaagtgtaaggggtctgtttgtattgaacctactcctgtaataattaccagtaatactgatatgtgcatgattgtggatggaaattctactacaatggaacacagaattcctttggaggaaagaatgttccagattgttctttcccataagctggaaggaaattttggaaaaatttcaaaaaaggaggtaaaagagtttttcaaatgggccaatgataatcttgttccagtagtttctgagtccaaagttcccacgaatgaacaaaccaaacctcctgagcccgttcctgaacgagcgaatgagccttccgagcctcctaagatatgggctccacctactagggaggagctagaggagatattaagagcgagccctgagctctttgcttcagttgctcctctgccttccagtccggagagatctcctaagagaaagaaaacccgtggggactatcaggtacgctgtgctatgcacagtttagataactctatgaatgtttttgaatgcctggagtgtgaaagagctaattttcctgaatttcagagtctgggtgaaaacttttgtaatcaacatgggtggtatgattgtgcattctgtaatgaactgaaagatgacatgaatgaaattgaacatgtttttgctattgatgatatggagaatgaacaataaaggtgattcaaaatagctatgtctacttttttagagaaatttgaagactggtatgagactgcagccgcatcttggcggcatttgaaagctggagcccccaagccaaaatcaaaccagcaatctcagtctgtgtctacagacagaaaaccccaacgaaaagacaataataggggctttgtacttcctggctataagtatcttgggcctggtaacgggcttgataaaggcccacctgtcaataaagcggacagcgtcgcgcttgagcacgataaagcgtacgaccagcagctcaaggcaggagacaacccctatatcaaatttaatcacgcagatcaagaatttatagataatctgcaaggtgatacctcctttggaggcaacctcggaaaagccgtattccaagctaaaaaaagaattctagagcctttaggcctagtagaagaacctgtaaacacggctcctgctaaaaagagtagtggaaaactaacagatcactaccctatagtaaagaagcctaaattatctgaagaaaactctccttcacctagtaatagtggaggagaagcaagtgcagctgccaccgaaggctccgaacctgtggcagcacctaacatggcagagggaggaagcggagctatgggcgactctgcagggggtgccgatggagtgggtaatgcctcaggaaattggcattgcgattcccaatggctgggagacacagtcattaccaagactacaagaacctgggtcctgtcaagctacaacaaccacatctacaaagccatcacaagcggaacaaacccagactcaaatacccaatatgctggatacagcaccccctgggggtactttgatttcaacagattccactgccatttctctccaagagactggcagagactcatcaacaaccattgggggattagaccgaaagcactcaaattcaagatattcaatgtacaagttaaagaagtcacgacgcaagaccagacaaagactattgctaacaaccttacctctacaatccagatattcacggataatgaacaccagctgccctatgttctgggctcggccacggaggggacgatgccaccgttcccctcagatgtgtatgccttgccccagtacggctactgcacaatgcacaccaaccagagtggagctagattcaatgacagaagtgccttctattgcttagagtacttccccagtcagatgctgagaacagggaataattttgaattcagttttgagtttgaagaagttcccttccatagcatgttcgctcattcacaggatttagacaggctaatgaatcctctcctagatcagtacctgtggaatttctctgaggttaatggtggcaggaatgcacagttcaagaaagctgtgaaaggagcatttggtgcaatggggagaaattggtttccaggacccaaacttctagaccaaagggtaagagcatacagtggaggaacagataactatgcgaactggtcaatctggagtaaaggaaacaaagtttttcttaaagacagagagtatctactgcaaccaggtccagtagctactacacatacagaagatcaggcttccagtataccggctcaaaacacaataggaattgcaaaagacccctacaggtcaggcagtagtctggcaggaatttcagacattatggtaacagaggagcaagaaatagcaccaactaatggtgtagggtggagaccttatggattgaccgtaaccaatgaacaaaacacaacaacagctcctacaaatgctgacctacaagtactgggagcgctacctggcatggtctggcagaacagagatatttacctgcagggtcctatatgggctaaaatacccaaaacagatgggaaatttcatccttctccaaacctgggaggttttggtctccataatccacctccccaggtctttataaaaaatactcctgttcctgcagatcctccagtagagtatgtaaatcaaaagtggaattcttacattacacagtattcaacagggcagtgtactgtagaaatggtctgggaactcagaaaagaaaactccaagagatggaaccctgagatccagtttaccagtaactttggaaatagaacaagtactatgtttgctccgaatgagactggaggctatgtagaagataggctgattggtaccaggtatttgactcagaatctgtaaatttctgtattcttttgatttttaaataaagcatttcctggcgcgcaaaaagtcctgctgtccttgagtctcattggagggttcgttcgttcgaaccagccaat

SEQ ID NO: 68 - DNA, 4234 bp, Muscovy duck parvovirus
tttccggttgcattcattcgttgctctgctctcacagagaacggacctcaggtcaggaaaatggcattttctaggcctcttcagatttcttctgacaaattctatgaagttatcatcaggctaccctcggatattgatcaagatgtgcctggtttgtctcttaactttgtagaatggctttctacgggggtctgggagcccaccggaatatggaatatggagcatgtgaatctccccatggttactctggcagacaaaatcaagaacattttcatccagagatggaaccaattcaatcaggacgaaacggatttcttctttcaattggaagaaggcagtgagtacatccatctgcattgctgtattgctcaggggaatgtccgatcttttgttctggggagatacatgtctcaaattaaagactcaattctgagagatgtgtatgaagggaaacaggtaaaaaacccggattggttttctataactaaaaccaaacggggagggcaaaataagaccgtgactgctgcttatattctgcattacctgattcctaaaaaacaaccggaattacaatgggcttttaccaatatgccccttttcactgctgctgctttatgcctccaaaagaggcaagagttactggatgcttttcaggaaagtgagatgaatgctgtagtgcaggaggatcaagcttcaactgtagctccccttatttccaacagagcagcaaagaactatagcaatctggttgattggctcattgagatgggtatcacctctgaaaaacagtggctaactgaaaataaagagagctaccggagctttcaggctacatcttcaaacaacagacaagtaaaagcagcacttgaaaatgcccgagcagaaatgctactaacgaaaactgccacagactatttgattggaaaagacccagttctggacattactaaaaatcggatctatcaaattctgaagttgaataactataaccctcaatatgtagggagcatcctatgcggatgggtgaaaagagaattcaacaaaagaaatgccatatggctctacggacctgcgaccaccggaaagaccaacatagccgaggctattgcccatgctgtacccttctatggctgtgttaactggactaatgagaacttcccatttaatgactgcgttgataaaatgcttatatggtgggaggaaggaaaaatgaccaataaagtagtggaatccgcaaaagcgatactgggggggtctgctgttcgagttgatcaaaagtgtaaggggtctgtttgtattgaacctactcctgtaataattaccagtaatactgatatgtgcatgattgtggatggaaattctactacaatggaacacagaattcctttggaggaaagaatgttccagattgttctttcccataagctggaaggaaattttggaaaaatttcaaaaaaggaggtaaaagagtttttcaaatgggccaatgataatcttgttccagtagtttctgagttcaaagtccctacgaatgaacaaaccaaacttactgagcccgttcctgaacgagcgaatgagccttccgagcctcctaagatatgggctccacctactagggaggagctagaggagatattaagagcgagccctgagctctttgcttcagttgctcctctgccttccagtccggagagatctcctgagagaaagaaaacccgtggggactatcaggtacgctgtgctatgcacagtttagataactctatgaatgtttttgaatgcctggagtgtgaaagagctaattttcctgaatttcagagtctgggtgaaaacttttgtaatcaacatgggtggtatgattgtgcattctgtaatgaacagaaagatgacatgaatgaaattgaacatgtttttgctattgatgatatggagaatgaacaataaaggtgattcaaaatagctatgtctacttttttagagaaatttgaagactggtatgagactgcagccgcatcttggcggcatttgaaagctggagcccccaagccaaaatcaaaccagcaatctcagtctgtgtctacagacagaaaaccccaacgaaaagacaataataggggctttgtacttcctggctataagtatcttgggcctggtaacggccttgatataggcccacctgtcaataaagcggacagcatcgcgcttgagcacgataaagcgtacgaccagcagctcaaggcaggagacaacccctatatcaaatttaatcacgcagatcaagaatttatagataatctgcaaggtgatacctcctttggaggcaacctcggaaaagccgtattccaagctaaaaaaagaattctagagcctttaggcctagtagaagaacctgtaaacacggctcctgctaaaaagagtagtggaaagctaacagatcactaccctatagtaaaaaagcctaaattatctgaagaaaactctccttcacccagtaatagtggaggagaagcaagtgcagctgccaccgaaggctccgaacctgtggcagcacctaacatggcagagggaggaagcggagctatgggcgactctgcagggggtgccgatggagtgggtaatgcctcaggaaattggcattgcgattcccaatggctgggagacacagtcattaccaagactacaagaacctgggtcctgccaagctacaacaaccacatctacaaagccatcacaagcggaacaaacccagactcaaatacccaatatgctggatacagcaccccctgggggtactttgatttcaacagattccactgccatttctctccaagagactggcagagactcatcaacaaccattgggggattagaccgaaagcactcaaattcaagatattcaatatgcaagttaaagaagtcacgacgcaagaccagacaaaaactattgctaacaaccttacctctacaatccagatattcacggataatgaacaccagctgccctatgttctgggctcggccacggaggggacgatgccaccgttcccctcagatgtgtatgccttgccccagtacggctactgcacaatgcacaccaaccagagtggagctggattcaatgacagaagtgccttctattgcttagagtacttccccagtcagatgctgagaacagggaataattttgaattcagttttgagtttgaagaagttcccttccatagcatgttcgctcattcacaggatttagacaggctaatgaatcctctcctagatcagtacctgtggaatttctctgaggttaatggtggcaggaatgcacagttcaaaaaagctgtgaaaggagcatttggtgcaatggggagaaataggcttccaggacccaaacttctagaccaaagggtaagagcataccgtggaggaacagataactatgcgaactggtcaatctggagtaaaggaaacaaagtttttcttaaagacagagagtatctactgcaaccaggtccagtagctactacacatacagaagatcaggattccagtataccggctcaaaacacaataggaattgcaaaagacccctacaggtcaggcagtagtctggcaggaatttcagacattatggtaccagatgagcaagaaatagcaccaactaatggtgtagggtggagaccttatggattgaccgtaaccaatgaacaaaacacaacaacagctcctacaaatgctgacctacaagtactgggagcgctacctggcatggtctggcagaacagagatatttacctgcagggtcctatatgggctaaaatacccaaaacagatgggaaatttcatccttctccaaacctgggaggttttggtctccataatccacctccccaggtctttataaaaaatactcctgttcctgcagatcctccagtagagtatgtaaatcagaagtggaattcttacattacacagtattcaacagggcagtgtactgtagaaatggtctgggaactcagaaaagaaaactccaagagatggaaccctgagatccagtttaccagtaactttggaaatagaacaagtactatgtttgctccgaatgagactggaggctatgtagaagataggctgattggtaccaggtatttgactcagaatctgtaaatttctgtattcttttgattttaaataaagcatttcctggcgcgcaaaaagtcctgctgtccttgagtctcat

SEQ ID NO: 69 - DNA, 5061 bp, Muscovy duck parvovirus
ctcattggagggttcgttcattcgaaccggccaatcaggggaggggggaagtgacgtaagttccggtcacgtgcttccggtcacgtgcttccggtcatgtgacttccggtcacgtgtttcctgtcacgtgacttccggtgacgcacttcctttgatgacgtatttccggttgtcaaggctgatcgggcgcatgcgcgtggtcaacctaacagccggaaatacgtcatcaaaggaagtgcgtcaccggaagtcacgtgacaggaaacacgtgaccggaagtcacatgaccggaagcacgtgaccggaagcacgtgaccggaacttacgtcacttcccccctcccctgattggccggttcgaacgaacgaaccctccaatgagactcaaggacagcaggactttttgcgcgccaggaaatgacgttaggggctgccctatataagccagtaagcttccggtttggttcattcgttactctgctctcacagagaacggacctcaggtcggagacatggcactttctaggcctctgcagatttcttctgataaattctatgaagttattattagattaccctcggatattgatcaggatgttcccggtctgtctcttaactttgtagaatggctttctacgggggtctgggagcccaccggaatatggaatatggagcatgtgaatctccccatggttactctggcagacaaaatcaagaacattttcatccagagatggaaccaattcaatcaggacgaaacggatttcttctttcaattggaagaaggcagtgagtacatccatctgcattgctgcattgcccaggggaatgtccgatcttttgttctggggagatacatgtctcaaattaaagactcaattctgagagatgtgtatgaagggaaacaggtaaaaatcccggattggttttctataactaaaaccaaacggggagggcaaaataagaccgtgactgctgcttatattctgcattacctgattcctaaaaaacaaccggaattacaatgggcttttaccaatatgccccttttcactgctgctgctttatgcctccaaaagaggcaagagttactggatgcttttcaggaaagtgagatgaatgctgtagtgcaggaggatcaagcttcaactgtagctccccttatttccaacagagcagcaaagaactatagcaatctggttgattggctcattgagatgggtatcacctctgaaaaacagtggctaactgaaaataaagagagctaccggagctttcaggctacatcttcaaacaacagacaagtaaaagcagcacttgaaaatgcccgagcagaaatgctactaacaaaaactgccacagactatttgattggaaaagacccagttctggacattactaaaaatcggatctatcaaattctgaagttgaataactataaccctcaatatgtaggaagcatcctatgcggatgggtgaaaagagaattcaacaaaagaaatgccatatggctctacggacctgcgaccaccggaaagaccaacatagccgaggctattgcccatgctgtacccttctatggctgtgttaactggactaatgagaacttcccatttaatgactgcgttgataaaatgcttatatggtgggaggagggaaaaatgaccaataaagtagtggaatccgcaaaagcgatactgggggggtctgctgtacgagttgatcaaaagtgtaaggggtctgtttgtattgaacctactcctgtaataattaccagtaatactgatatgtgcatgattgtggatggaaattctactacaatggaacacagaattcctttggaggaaagaatgttccagattgttctttcccataagctggaaggaaattttggaaaaatttcaaaaaaggaggtaaaagagtttttcaaatgggccaatgataatcttgttccagtagtttctgagttcaaagtccctacgaatgaacgaaccaaacttactgagcccgttcctgaacgagcgaatgagccttccgagcctcctaagatttgggctccacctactagggaggagctagaggagatattaagagcgagccccgagctctttgcttcagttgctcctctgccttccagtccggagagatctcctgagagaaagaaaacccgtggggactatcaggtacgctgtgctatgcacagtttagataactctatgaatgtttttgaatgcctggagtgtgaaagagctaattttcctgaatttcagagtctgggtgaaaacttttgtaatcaacatgggtggtatgattgtgcattctgtaatgaactgagagatgacatgaatgaaattgaacatgtttttgctattgatgatatggagaatgaacaataaagatgattcaaaatagctatgtctacttttttagagaaatttgaagactggtatgagactgcagccgcatcttggcggcatttgaaagctggagcccccaagccaaaatcaaaccaacaatctcagtctgtgtctacagacagaaaaccccaacgaaaagacaataataggggctttgtacttcctggctataagtatcttgggcctggtaacggccttgataaagggccacctgtcaataaagcggacagcgtcgcgcttgagcacgataaagcgtacgaccagcagctcaaggcaggagacaacccctatataaaatttaatcacgcagatcaagaatttatagataatctgcaaggtgatacctcctttggaggcaacctcggaaaagccgtattccaagctaaaaaaagaattctagagcctttaggcctagtagaagaacctgtaaacacggctcctgctaaaaagagtagtggaaaactaacagatcactaccctatagtaaagaagcctaaattatctgaagaaaactctccttcacctagtaatagtggaggagaagcaagtgcagctgccaccgaaggctccgaacctgtggcagcacctaacatggcagagggaggaagcggagctatgggcgactctgcagggggtgccgatggagtgggtaatgcctcaggaaattggcattgcgattcccaatggctgggagacacagtcatcacaaagaccaccagaacctgggtcctgccaagctacaacaaccacatctacaaagcgattaccagtggaacctctcaagatgcaaatgtccagtatgcaggatacagtaccccctgggggtactttgatttcaacagattccactgccacttctctccaagagactggcagagacttatcaacaaccattggggaatcagacccaagtctcttaaattcaagatcttcaatgtccaggtcaaagaagtcacaacgcaggatcagacgaagaccattgcaaacaatctcacgtcaacaattcaagtctttacggatgacgagcatcaactcccgtatgtcctgggctcggctacggaaggcaccatgccgccgttcccgtcggatgtctatgccctgccgcagtacgggtactgcaccatgcacaccaaccagaatggagcacggttcaatgaccgtagtgcattctactgcttagagtacttccctagtcagatgctaagaacaggcaacaactttgagttcacatttgactttgaagaagttcctttccatagcatgttcgctcattcacaggacttagacaggctgatgaaccccctagtggatcaatacctctggaatttcaatgaggtagacagcaacagaaatgctcaatttaaaaaggctgtgaaaggcgcttatggcaccatgggccgcaattggctgccaggacctaaattcctggaccagagagttagggcctatccaggcggaacagataattatgcaggctggaacatctggaataatggaaacaaggttaatttgaaggacaggcagtacctcctgcaacctggacctgtatcagctactcacacagaagcagaggcttccagcatcccagcccaaaatattttaggtttagctaaagatccatacagatctggcagcactgcagcaggaataaatgatattatggtaacggacgagcaggaagtagcacctacaaacggtgtagggtggaaaccatatggcaagactgtaacgaatgaacaaaacactactagagctcctacgagttcagatcttgatgttcttggagctttaccaggaatggtttggcagaacagagatatatatctacagggtcctatatgggctaaaatacccaaaacagatgggaaatttcatccttctccaaacctgggaggttttggtctccataatccacctccccaggtctttattaaaaatacccctgttcctgcagatcctccactagagtatgtaaatcagaagtggaattcttacattacacagtattcaacagggcagtgtactgtagaaatggtctgggaactcagaaaagaaaactccaagagatggaaccctgagatccaatttaccagtaactttggaaatagaacaagtactatgtttgctccaagtgagactggaggctatgtagaagataggctgattggtaccagatatttgactcagaatctgtaaatttctgtattcttttgaatttaaataaaccatttcctggcgcgcaaaaagtcctgctgtccttgagtctcattggagggttcgttcattcgaaccggccaatcaggggaggggggaagtgacgtaagttccggtcacgtgcttccggtcacgtgcttccggtcatgtgacttccggtcacgtgtttcctgtcacgtgacttccggtgacgcacttcctttgatgacgtatttccggttgtcaaggctgatcgggcgcatgcgcgtggtcaacctaacagccggaaatacgtcatcaaaggaagtgcgtcaccggaagtcacgtgacaggaaacacgtgaccggaagtcacatgaccggaagcacgtgaccggaagcacgtgaccggaacttacgtcacttcccccctcccctgattggccggttcgaacgaacgaaccctccaatgag

SEQ ID NO: 70 - DNA, 1297 bp, Serpentine adeno-associated virus
ccattctgtaactgtccgggaaaaatgttaatttggtgggaggagggtaaaatgactcaaaaaattgtggaaaccgctaaatgtatattaggtggaactagagtacccgtagatgttaaatgtaaaatggccgaaatatgtgaaggcactcctgtaattattaccagtaataccaacatgtgtcaagtatttgatgggaatagttctagttttgaacacaccgagccgttacaggaacgcatgtttaaaattagattaaatattaaactgccttcagactttggccgagtaactaaacaggaagtacaagattttataaggtggggctctgatcatccaatggaaattagccacgtatttgaaacaccaaaagaggccccgccccttattcaaacgcctataaaaaaccgagagaaagaggcggaaacttcatttgaagagcaaccgccgagtaagagggtgtgtcttgatagcgagaagcaggtaagacatactacggaaatttgtaacaatattgtacctagagctaacttgttagaacttgctaatactactcaatgcatgttacacggtacatttacttgtatggaatgttatcctgaattgactgaatgtgttgatgatgttgatgtcgaacaataaagcttactgataatagacatggattttgtcgataattttttcacagacaaatataaagagacttacaaagaactctctaaacctgttaatcctcccccggtacagcatattagcgaaaagcattccgaacctggatcgaggggtcttgtggtgcctggttataagtatcttgggcctggcaatagcttggaccgtggagaacccgttaaccaagcagacgctgctgccaaagaacacgacatctcgtacgacaaacaactcaaagtcggagataatccgtacgtaaagtacaatcacgccgacgaacagtttcaacagaaactagaaggcgacaccagtttagccggaaacgccgctaacgccgtcttccaagccaagaagcgcctactagaaccgtttggtctagtagaagcgcccctaccggccaaaacggatagcaagaaagtagacgactactttccgaaagcaaagaaagcaaaacagagctttcaaatcccggcaccctctaaaagcgatccgggagaaggtacttctgcccagtctggaggtagcccagcaggttccgatactagcggctcatctatcatggctgaaggaggaggcggaccaatggcaagcgatcaacaaggtgccgagggagtgggtaattcctcag

SEQ ID NO: 71 - DNA, 4432 bp, Snake parvovirus
cgccccacccctagtgatcgcgcgcgctctctcttggggcctgacggccgaaggccgtcagctgccgagcttcgctcggcaggccccaagagagagcgcgcgcgatcactaggggtggggcgagtgccctgctcaacgggttttttggtgggcggagcaatgacgtcagcggacatgtctggacatgtctttgagcaagtccatataaggagttccgccggatatgcaaatgagcaatcgcgcaaagcattttgggtagtcaccatgaataaaaaggacagcaagaaagatgacgccccataattttaataggaattttaaccatggcgttttacgaggttgtgtttcgtttgccaagagacaataacaacttgttggatgaagatagatatcagccagagttgaaagaagaagatgactggcctgaggaatatttaaccagtgaagatgccagctttatcggactagcgtatgctgtgctaagtgaaattcggagattctttggaaaggaactacaatggtttgcccaggttgaatggtgtcctactgctggttaccacatgcatgttttgttgaaccatcctaagctgagtaaccagacttatggaagaaaggtcaatgaactggcttgccgtatagtcgatacctttggcctaattaatccagaagaagtcatcagtacccattatgttaaaagcaactatggacataaaaaggtgagagtcattcacctagagtcttatttgaagaactactttttcagaaagactttagctcctcccaattataccgaggaaggagactataaaagagaggaagaagtcgtgctgtgggcatttacgaatatcgtcgcttggaagccattcgtgcggaatctcatcaagagatcggagctagcgactgttcctaagcaaccagagaatccggcgggagacggaccggcacctcgagtgactgcaggaacccgccattttatggaaaccatcgactggttggtgaaacatggaattactacagaacgagaattctgccacgccaaccgccctttgtacctgtctatgctggcttctacttcgggtgctgggcagattaaaagagcgctggaccaggcgaaacacatgatgaccagcaccatgtcagcagaggattacctgacaacagaagaggatgtgatcgaaccacctactgaaaatagaatctacaagattatgaaactgaatcgctatgatccagaactagcagctgctctcttctacggctggacctgcaagaactttggcaagagaaacaccatctggctgtatggtccagctactaccggcaaaaccatcatcgctcaagctattgcacatgctgttaaactgtttgctggtgttaattggactaatgaaaactttcccttctgtaactgtccagggaaactgcttatctggtgggaggagggcaagatgacaaacaaaatggtggagacggctaaatgtatactggggggatctgctgtacctgtagacatcaaaggcaaacccgctgaaatgtgtcctcaaacaccctgtattattactagcaatactaacatgtgtcaagtatatgatggtaatagttctagctttgagcaccaagaacccctagaggaacgcatgtttatgttcagacttaatactaaactgccatcgacctttggcaagatcacagaagaggaagtcaaacagtttattacctgggggaggagcttaaaggttcaagttccacatcagttcagagtgcctaccacaggagagtataaaaggccagcccccgaggcgaaagctcattcttcggatgagccgccaaaagagaaggtcgcgcgtattgatgactctctaaccaggtatgttaacaatattgatgagtcagctaccagtagagaaatgtttctagagattgctaatactaatcaatgtatgttgcatcattgcttttcttgtaccgaatgttatcctgaattgcttgatgacatggacaaggaacaataaacttactgataacagatatggattttctcgatgatttctttgcagataaatataaagagactgttaacgaactcggtaaaccggtcaatcctaaacctgtaaaacacattagcgaagctcactcgcaacctggcagcaggaggggctttgtggtgcctgggtatcggtatcttgggcctggtaatagcttggaccgtggaaagcccgttaacaaagcagacgaggctgctaaaaagcacgatcaagaatacgatcaacagcttaaagcgggagacaatccctacataaaatataatcacgcggacgaacagttccagaaagacctacaaggtgataccagtctagccggcaacgcggctaacgctctatttcaaggcaaaaagactctactagcgccccttggcctagtagagacccctgtcggcaaaacgtctgaaaagcacaaattagacgaatactatcctaaagctaaaaaggccaaacaaggcttgcagataccagctccacctaaaggcggagaagaagaagctacatcgtcacaatctggagggagcccagcaggttccgatactagcggcacatctgtcatggctacaggaggaggcggtccgatggcagacgataaccagggcgccgagggagtgggtaattcctcaggtgattggcattgcgataccaagtggatgggagaccacgtcattacaaagtcaaccagaacttgggtgctccccacttacgggaatcatctctacgggcctatcaactttgacggcaccacaggttcgggtgctaatgcagcctatgcaggatacaagactccctgggggtactttgacttcaatcgattccattgccacttctccccccgagactggcaaagactcatcaacaaccacacaggcatcaggccgaaaggactcaaaatcaaagtctttaacgtccaagtcaaagaagttacaacacaagattcaacgaaaacaattgccaacaatctcaccagcaccgtacagatctttgcggacgagaactacgacttaccatatgtattaggcagtgctacacaaggcacatttcctccatttcccaatgatgtatttatgttaccacaatatgcttattgtacacttcaaggaaattcggggaaatttgtagatagaagtgccttttattgtttagaatattttccttcacaaatgctgagaacaggaaacaattttgagttccagtttaaatttgaagaagttccctttcattctggatgggcacagagtcaaagcctagacagattgatgaatccgttgcttgatcaatatctgataggagactatggaacagatgcatcaggaaaccttatttatcacagagctggtccaaatgatttgaatgaattctacaagaattgggcacctgcaccctatgaatgtatccagaatattaacagcagtgataataccaagaatgctaattctataaatggttcaaattctaccaacaaatggggactacaaggaagacaagcatgggatgctccaggatttgttcaagctagtacctatgaaggtgcagcagcaggacaatctcttcttaatggcgtacttactttcgataaaagttcagctactacttcatctccagctgctactgcagtaaacagaacaattgaagacgaaatacagggtaccaataattttggtaatgctagaaataacattgttgctatcaatcaacaaacgaaaggaacaaatccaacaacaggtagtacatctcaatttgagacaatgccaggtatggtgtggtctaatagagacatttacttacaggggcctatttgggctaaaattccaaatacagatggacattttcatccttctcccagaatgggtggttttggattaaaacatcctccgcctatgattctgatcaaaaatacaccagttcctgctgatcctccaactaccttcaatccaatgccacagactagtttcattactgaatacagtacaggacaagtaactgttgaaatgttgtgggaggtacagaaagaatcctccaaaagatggaatccagaagtacagtttacttccaattttggaacttcagatccagctgttgatggaataccgtttggaattaataatttgggtacttatgttgaatctagacctattggaactcgttatatttctaaacacttgtaaataataaaaattgtcaaatttgcactaagaattgttgtcacgtggttgtttacatgcttgctaaaacacgcccaccaaaaaacccgttgagcagggcactcgccccacccctagtgatcgcgcgcgctctctcttggggcctgccgagcgaagctcggcagctgacggccttcggccgtcaggccccaagagagagcgcgcgcgatcactaggggtggggcg

SEQ ID NO: 72 - DNA, 1884 bp, Duck parvovirus
atggcattttctaggcctcttcagatttcttctgacaaattctatgaagttatcatcaggctaccctcggatattgatcaagatgtgcctggtttgtctcttaactttgtagaatggctttctacgggggtctgggagcccaccggaatatggaatatggagcatgtgaatctccccatggttactctggcagacaaaatcaagaacattttcatccagagatggaaccaattcaatcaggacgaaacggatttcttctttcaattggaagaaggcagtgagtacatccatctgcattgctgcattgcccaggggaatgtccgatcttttgttctggggagatacatgtctcaaattaaagactcaattctgagagatgtgtatggagggaaacaggtaaaaatcccggattggttttctataactaaaaccaaacggggagggcaaaataagaccgtgactgctgcttatattctgcattacctgattcttaaaaaccaccgggaattacaatgggcttttaccaatatgccctttttcactgctgctgctttatgcttccaaaagaggcaagagttactggatgcttttcaggaaagtgagatgaatgctgtagtgcaggaggatcaagcttcaactgtagctccccttatttccaacagagcagcaaagaactatagcaatctggttgattggctcattgagatgggtatcacctctgaaaaacagtggctaactgaaaataaagagagctaccggagctttcaggctacatcttcaaacaacagacaagtaaaagcagcacttgaaaatgcccgagcagaaatgctactaacaaaaactgccacagactatttgattggaaaagacccagttctggacattactaaaaatcggatctatcaaattctgaagttgaataactataaccctcaatatgtagggagcatcctatgcggatgggtgaaaagagaattcaacaaaagaaacgccatatggctctacggacctgcgaccaccggaaagaccaacatagccgaggctattgcccatgctgtacccttctatggctgtgttaactggactaatgagaacttcccattcaatgactgcgttgataaaatgcttatatggtgggaggagggaaaaatgaccaataaagtagtggaatccgcaaaagcgatactgggggggtctgctgtacgagttgatcaaaagtgtaaggggtctgtttgtattgaacctactcctgtaataattaccagtaatactgatatgtgcatgattgtggatggaaattctactacaatggaacacagaattcctttggaggaaagaatgttccagattgttctttcccataagctggaaggaaattttggaaaaatttccaaaaaggaggtaaaagagtttttcaaatgggccaatgataatcttgttccagtagtttctgagttcaaagtccctacgaatgaacaaaccaaacttactgagcccgttcctgaacgagcgaatgggccttccgagcctcctaagatatgggctccacctactagggaggagctagaggagaccctaagaacgagccctgagctctttgcttcagttgctcctctgccttccagtccggagagatctcctaagagaaagaaaacccgtggggactatcaggtacgctgtgctatgcacagtttagataactctatgaatgtttttgaatgcctggagtgtgaaagagctaattttcctgaatttcagagtctgggtgaaaacttttgtaatcaacatgggtggtatgattgtgcactctgtaatgaactgagagatgacatgaatgaaattgaacatgtttttgctattgatgatatggagaatgaacaataa

SEQ ID NO: 73 - DNA, 1884 bp, Goose parvovirus
atggcactttctaggcctctgcagatttcttctgataaattctatgaagttattattagattaccatcggatattgatcaggatgttcccggtctgtctcttacctttgtagaatggctttctaccggagtttgggagcccacgggcatctggaacatggagcgtgtgaatctaccgatggtgactttggcagagaaaatcaagaatatcttcatacaaaggtggaatcagttcaatcaggacgaaacggacttcttctttcaactggaagaaggcagtgagtacattcatcttcattgctgtattgcccagggcaatgtacggtcttttgttctcgggagatatatgtctcagataaaagactctatcataagagatgtatatgaaggaaaacaaatcaagatccccgattggtttgctatcactaaaaccaagcggggaggacaaaataagaccgtgactgcagcatacatattgcactacctgatacctaaaaaacaacctgagctgcaatgggcctttaccaatatgccattatttagtccggctgctctttgtctgcaaaagcggcaagaattgctggatgcatttcaagaaagcgatttggccgcccctttacctgatcctcaggcatcaactgtggcaccacttatttccaacagagcggcaaagaactatagcaaccttgttgattggctcattgaaatgggcataacatccgagaagcagtggctcactgagaaccgagagagctacagaagttttcaagcaacttcttcaaataatagacaagtgaaagctgcattggaaaatgcccgtgccgaaatgctattaacaaagactacaaccgattacctgataggaaaagatcctgtcctggacataactaagaacagggtctatcaaattctgaaaatgaataattacaaccctcaatacataggaagtatcctgtgcggctgggtgaagagagagttcaacaaaagaaacgccatatggctctacggacctgccaccaccgggaagaccaacattgcagaagctattgcccatgctgtacccttctatggctgcgttaactggactaacgagaactttccttttaatgattgtgtcgataagatgttgatttggtgggaggagggaaagatgactaacaaggttgtagagtctgcgaaagcaattttggggggctctgctgtccgggtagaccagaaatgtaaagggtctgtttgtattgaacctactcctgtaattattaccagtaacactgacatgtgtatgattgttgatggtaactccactacgatggagcatagaataccactagaggagcgtatgtttcaaatcgtactatcacataaattagagccttctttcggaaaaatctcgaaaaaagaagttagagaattctttaaatgggccaatgataacttagttcctgttgtatctgagttcaaagtccgaacgaatgaacaaaccaacttgccagagcccgttcctgaacgagcgaacgagccggaggagcctcctaagatctgggcccctcctactagggaggagttagaagagcttttaagagccagcccggaactgttctcagcagttgctccgattcctgtgactcctgagaactctcccgagcctaagagaagcaggaacaattaccaggtacgatgtgctttgcatacttatgacaattctatggatgtctttgaatgtatggactgcgagacggccaattttccggaatttcaacctctgggggaaaactgttgtgatgaacatgggtggtatgactgtactatctgtaaagaattgaaagatgaacttgcagaaattgagcatgtgtttgagcttgatgatgctgaaaatgaacaataa

SEQ ID NO: 74 - DNA, 1884 bp, Goose parvovirus
atggcactttctaggcctcttcagatttcttctgataaattctatgaagttatcattagattaccatcggatattgatcaagatgtccccggtctgtctcttaactttgtagaatggctttctaccggagtttgggagcccacgggcatctggaacatggagcatgtgaatctaccgatggtgaccttggcagagaagatcaagaacattttcatacaaagatggaatcagttcaaccaggacgaaacggacttcttctttcaactggaagaaggcagtgagtacattcatcttcattgctgtattgcccagggcaatgtacggtcttttgttctcgggagatatatgtctcagataaaagactctatcataagagatgtatatgaagggaaacaaatcaagatccccgattggtttgctattactaaaaccaagaggggaggacagaataagaccgtgactgcagcatacatactgcattaccttattcctaaaaagcaacctgaactgcaatgggcctttaccaatatgcctttattcactgctgctgctctttgtctgcaaaagcggcaagaattgctggatgcatttcaagaaagtgatttggctgcccctttacctgatcctcaagcatcaactgtggcaccgcttatttccaacagagcggcaaagaactatagcaaccttgttgattggctcattgaaatggggataacatctgagaagcaatggctcactgagaaccgagagagctacagaagctttcaagcaacttcttcaaataatagacaagtgaaagctgcactggaaaatgcccgtgctgaaatgttattgacaaagactgcaaccgattacctgataggaaaagaccctgtcctggacataactaagaatagggtctatcagattctgaaaatgaataactacaaccctcaatacataggaagtatcctgtgcggctgggtgaagagagagttcaacaaaagaaacgccatatggctctacggacctgccaccaccgggaagaccaacattgcagaagctattgcccatgctgtacccttctatggctgtgttaactggactaatgagaactttccttttaatgattgtgttgataaaatgctgatttggtgggaggagggaaaaatgactaataaggttgttgaatctgcaaaagcaattttaggagggtctgctgtccgggtagaccagaaatgtaaaggatctgtttgtattgaacctactcctgtaattattactagtaatactgatatgtgtatgattgttgatggcaactctactacaatggaacatagaataccgttagaggagcgtatgtttcaaatcgtcctatcacataaattggagccttcttttggaaaaatttctaaaaaagaagtcagagaatttttcaaatgggccaatgataatctagttcctgttgtgtctgagttcaaagtccgaacgaatgaacaaactaacttgccagagcccgttcctgaacgagcgaacgagccggaggagcctcctaagatctgggctcctcctactagggaggagttagaagagcttttaagagccagcccagaattgttctcatcagtcgctccaattcctgtgactcctcagaactcccctgagcctaagagaagcaggaacaattaccaggtacgctgcgctttgcatacttatgacaattctatggatgtatttgaatgtatggaatgtgagaaagcaaactttcctgaatttcaacctctgggagaaaattattgtgatgaacatgggtggtatgattgtgctatatgtaaagagttgaaaaatgaacttgcagaaattgagcatgtgtttgaacttgatgatgctgaaaatgaacaataa

SEQ ID NO: 75 - DNA, 1884 bp, Goose parvovirus
atggcactttctaggcctctgcagatttcttctgataaattctatgaagttattattagattaccatcggatattgatcaggatgttcccggtctgtctcttacctttgtagaatggctttctaccggagtttgggagcccacgggcatctggaacatggagcgtgtgaatctaccgatggtgactttggcagagaaaatcaagaatatcttcatacaaaggtggaatcagttcaatcaggacgaaacggacttcttctttcaactggaagaaggcagtgagtacattcatcttcattgctgtattgcccagggcaatgtacggtcttttgttctcgggagatatatgtctcagataaaagactctatcataagagatgtatatgaaggaaaacaaatcaagatccccgattggtttgctatcactaaaaccaagcggggaggacaaaataagaccgtgactgcagcatacatattgcactacctgatacctaaaaaacaacctgagctgcaatgggcctttaccaatatgccattatttagtccggctgctctttgtctgcaaaagcggcaagaattgctggatgcatttcaagaaagcgatttggccgcccctttacctgatcctcaggcatcaactgtggcaccacttatttccaacagagcggcaaagaactatagcaaccttgttgattggctcattgaaatgggcataacatccgagaagcagtggctcactgagaaccgagagagctacagaagttttcaagcaacttcttcaaataatagacaagtgaaagctgcattggaaaatgcccgtgccgaaatgctattaacaaagactgcaaccgattacctgataggaaaagatcctgtcctggacataactaagaacagggtctatcaaattctgaaaatgaataattacaaccctcaatacataggaagtatcctgtgcggctgggtgaagagagagttcaacaaaagaaacgccatatggctctacggacctgccaccaccgggaagaccaacattgcagaagctattgcccatgctgtacccttctatggctgcgttaactggactaacgagaactttccttttaatgattgtgtcgataagatgttgatttggtgggaggagggaaagatgactaacaaggttgtagagtctgcgaaagcaattttggggggctctgctgtccgggtagaccagaaatgtaaagggtctgtttgtattgaacctactcctgtaattattaccagtaacactgacatgtgtatgattgttgatggtaactccactacgatggagcatagaataccactagaggagcgtatgtttcaaatcgtactatcacataaattagagccttctttcggaaaaatctcgaaaaaagaagttagagaattctttaaatgggccaatgataacttagttcctgttgtatctgagttcaaagtccgaacgaatgaacaaaccaacttgccagagcccgttcctgaacgagcgaacgagccggaggagcctcctaagatctgggcccctcctactagggaggagttagaagagcttttaagagccagcccggaactgttctcagcagttgctccgattcctgtgactcctgagaactctcccgagcctaagagaagcaggaacaattaccaggtacgatgtgctttgcatacttatgacaattctatggatgtctttgaatgtatggactgcgagacggccaattttccggaatttcaacctctgggggaaaactgttgtgatgaacatgggtggtatgactgtactatctgtaaagaattgaaagatgaacttgcagaaattgagcatgtgtttgagcttgatgatgctgaaaatgaacaataa

SEQ ID NO: 76 - DNA, 220 bp, Peromyscus adeno-associated virus
ttcaagtctttacggatgacgactaccagttgccctacgtcctcggcaacgcgactgaaggctgcctgccggcgttcccgccggaggtattcaccctaccccagtacggctacgcgacgctaaacactccaacgagcggacaacctgtggagcggagtgccttcttctgcctggagtactttccctccaaaatgctgagaaccggcaacaactttgaatt

SEQ ID NO: 77 - DNA, 422 bp, Peromyscus adeno-associated virus
acccagttctggaacactgtgactaatgctaacaaccaggcgggagttactgctagttctactagcaacacagtacagatccagggtcaaggcttcatgagccgcccagagccggctggcatgaccaacaacacagacaacagcaactgggttggcttggacaattccatgatcttcaacaatcagactgctgcccctggcgaaggttctcttctccaagtgaacaatatgcttatcaccaaagagaacgagactgatccagtgaatcctcaggccgacaaggtcgctggcaaggtcgcaagtaacaaccaagcaaacaccgtggctcctactgcgaccaccgtcgaccaccagggcgtactgcctggagctgtgtggatggacaaggacgtgtacttacacggacctatttgggccaagtt

SEQ ID NO: 78 - DNA, 280 bp, Peromyscus adeno-associated virus
ggattcccaacaccggagcccacttcccatccttctccgatgatgggaggtttcgggctgaagcatcctcctcctatgatgctgataaaaatactccggtgcctggcaacgtcaccaccttcagcgaccaaaaggttaatcaattcattaatcaatattcgaccggacaagtcaccgtatcgattacctgggagctgatgaaggaaaacagcaagcgatggaaccccgaactgcagtacaccaacaactaccccggttccctctttgtagactttgctcc

SEQ ID NO: 79 - DNA, 1884 bp, Goose parvovirus
atggcactttctaggcctcttcagatttcttctgataaattctatgaagttattattagattaccatcggatattgatcaagatgtccccggtctgtctcttaactttgtagaatggctttctaccggagtttgggagcccacgggcatctggaacatggagcatgtgaatctaccgatggtgaccttggcagagaagatcaagaacattttcatacaaagatggaatcagttcaaccaggacgaaacggacttcttctttcaactggaagaaggcagtgagtacattcatcttcattgctgtattgcccagggcaatgtacggtcttttgttctcgggagatatatgtctcagataaaagactctatcataagagatgtatatgaagggaagcaaattaagatccccgattggtttgctattactaaaaccaagagcggaggacagaataagaccgtgactgcaacatacatactgcattaccttattcctaaaaagcaacctgaactgcaatgggcctttaccaatatgcctttatttactgctgctgctctttgtctgcaaaagcggcaagaattgctggatgcatttcaagagagtgatttggctgcccctttacctgatcctcaagcatcaactgtggcaccgcttatttccaacagagcggcaaagaactatagcaaccttgttgattggctcattgaaatgggcataacatctgagaagcaatggctcactgagaaccgagagagctacagaagctttcaagcaacttcttcaaataatagacaagtgaaagctgcactggaaaatgcccgtgctgaaatgttattaacaaagactgcaactgattacctgataggaaaagaccctgtcctggacataattaagaatagggtctatcaaattctgaaaatgaataactacaaccctcaatacgtaggaagtatcctgtgcggctgggtgaagagagagttcaacaaaagaaacgccatatggctctacggacctgccaccaccgggaagaccaacattgcagaagctattgcccatgctatacccttctatggctgtgttaactggactaatgagaactttccttttaatgattgtgttgataagatgttgatttggtgggaggagggaaaaatgactaataaggttgttgaatctgcaaaagcaattttgggagggtctgctgtccgggtagaccagaaatgtaaaggatctgtttgtattgaacctactcctgtaattattactagtaatactgacatgtgtatgattgttgatggcaactctactacaatggaacatagaataccattagaggagcgtatgtttcaaattgtcctatcacataaattggaaccttcttttggaaaaatttctaaaaaagaagtcagagaatttttcaaatgggccaatgacaatctagttcctgttgtgtctgagttcaaagtccgaacgaatgaacaaaccaacttgccagagcccgttcctgaacgagcgaacgagccgaaggagcctcctaagatctgggctcctcctactagggaggagttagaagagcttttaagagccagcccagaattgttctcatcagtcgctccaattcctgtgactcctcagaactcccctgagcctaagagaagcaggaacaattaccaggtacgctgcgctttgcatacttatgacaattctatggatgtatttgaatgtatagaatgtgagaaagcaaactttcctgaatttcaacctctgggagaaaattattgtgatgaacatgggtggtatgattgtgctatatgtaaagagttgaaaaatgaacttgcagaaattgagcatgtgtttgagcttgatgatgctgaaaatgaacaataa

SEQ ID NO: 80 - DNA, 2211 bp, Adeno-associated virus
atggctgccgatggttatcttccagattggctcgaggacaaccttagtgaaggaattcgcgagtggtgggctttgaaacctggagcccctcaacccaaggcaaatcaacaacatcaagacaacgctcgaggtcttgtgcttccgggttacaaataccttggacccggcaacggactcgacaagggggagccggtcaacgcagcagacgcggcggccctcgagcacgacaaggcctacgaccagcagctcaaggccggagacaacccgtacctcaagtacaaccacgccgacgccgagttccaggagcggctcaaagaagatacgtcttttgggggcaacctcgggcgagcagtcttccaggccaaaaagaggcttcttgaacctcttggtctggttgaggaagcggctaagacggctcctggaaagaagaggcctgtagagcagtctcctcaggaaccggactcctccgcgggtattggcaaatcgggtgcacagcccgctaaaaagagactcaatttcggtcagactggcgacacagagtcagtcccagaccctcaaccaatcggagaacctcccgcagccccctcaggtgtgggatctcttacaatggcttcaggtggtggcgcaccagtggcagacaataacgaaggtgccgatggagtgggtagttcctcgggaaattggcattgcgattcccaatggctgggggacagagtcatcaccaccagcacccgaacctgggccctgcccacctacaacaatcacctctacaagcaaatctccaacagcacatctggaggatcttcaaatgacaacgcctacttcggctacagcaccccctgggggtattttgacttcaacagattccactgccacttctcaccacgtgactggcagcgactcatcaacaacaactggggattccggcctaagcgactcaacttcaagctcttcaacattcaggtcaaagaggttacggacaacaatggagtcaagaccatcgccaataaccttaccagcacggtccaggtcttcacggactcagactatcagctcccgtacgtgctcgggtcggctcacgagggctgcctcccgccgttcccagcggacgttttcatgattcctcagtacgggtatctgacgcttaatgatggaagccaggccgtgggtcgttcgtccttttactgcctggaatatttcccgtcgcaaatgctaagaacgggtaacaacttccagttcagctacgagtttgagaacgtacctttccatagcagctacgctcacagccaaagcctggaccgactaatgaatccactcatcgaccaatacttgtactatctctcaaagactattaacggttctggacagaatcaacaaacgctaaaattcagtgtggccggacccagcaacatggctgtccagggaagaaactacatacctggacccagctaccgacaacaacgtgtctcaaccactgtgactcaaaacaacaacagcgaatttgcttggcctggagcttcttcttgggctctcaatggacgtaatagcttgatgaatcctggacctgctatggccagccacaaagaaggagaggaccgtttctttcctttgtctggatctttaatttttggcaaacaaggaactggaagagacaacgtggatgcggacaaagtcatgataaccaacgaagaagaaattaaaactactaacccggtagcaacggagtcctatggacaagtggccacaaaccaccagagtgcccaagcacaggcgcagaccggctgggttcaaaaccaaggaatacttccgggtatggtttggcaggacagagatgtgtacctgcaaggacccatttgggccaaaattcctcacacggacggcaactttcacccttctccgctgatgggagggtttggaatgaagcacccgcctcctcagatcctcatcaaaaacacacctgtacctgcggatcctccaacggccttcaacaaggacaagctgaactctttcatcacccagtattctactggccaagtcagcgtggagatcgagtgggagctgcagaaggaaaacagcaagcgctggaacccggagatccagtacacttccaactattacaagtctaataatgttgaatttgctgttaatactgaaggtgtatatagtgaaccccgccccattggcaccagatacctgactcgtaatctgtaa

SEQ ID NO: 81 - DNA, 2196 bp, Adeno-associated virus
atggctgctgacggttatcttccagattggctcgaggacaacctctctgagggcattcgcgagtggtgggcgctgaaacctggagccccgcaacccaaagccaaccagcaaaagcaggacgacggccggggtctggtgcttcctggctacaagtacctcggacccttcaacggactcgacaagggggagcccgtcaacgaggcggacgccgcggccctcgagcacgacaaggcctacgaccagcagctcaaagcgggtgacaatccgtacctgcggtataatcacgccgacgccgagtttcaagagcgtctgcaagaagatacgtcctttgggggcaacctcgggcgagcagtcttccaggccaaaaagagggtactcgagcctctgggtctggttgaggaaggcgctaagacggctcctggaaagaagcggccagtagaaccggactccagctcgggcatcggcaagtcaggccagcagcccgcgaaaaagagactgaattttgggcagactggcgactcagagtcagtgcctgacccccaacctctctcagaaccacccgcaggtccctctggtctgggatctggtacaatggctgctggcggtggcgctccaatggcagacaataacgaaggcgccgacggagtgggtaatgtctcaggaaattggcattgcgattccacatggctgggcgaccgagtcatcaccaccagcactcggacctgggccctccccacctacaacaaccacctctacaagcaaatctccaacgggacctcgggaggcagcagcaacgacaacacctactttggctacagcaccccctgggggtattttgactttaacagattccactgccacttttcaccacgtgactggcagcgactcatcaacaacaactgggggttccggcccaagaagctcaacttcaagctcttcaacatccaggtcaaggaggtcacccagaatgaaggcaccaagaccatcgccaataacctcaccagcacggtgcaggtctttacggactcggagtaccagctcccgtacgtgctcggctctgcccaccagggctgcctgcctccgttcccggcggacgtgttcatgattccgcagtacgggtacctgacgctgaacaacgggagccaggccgtggggcgatcctccttctactgcctggagtactttccctcgcagatgctgagaacgggcaacaactttaccttcagctacaccttcgaggacgtgcccttccacagcagctacgcgcacagccagagcctggaccggctgatgaacccgctgattgaccagtacctgtactacctgtctcggactcagaccaacgggaccaatgccacgcagactctgttgtttgctcaggccgggcctcagaacatgtcggctcaggccaagaactggctgcctggtccttgctatcggcagcagcgcgtctctacgacagtgtcgcaaaacaacaacagcaactttacctggaccggggcgaccaagtaccacctgaacggccgagactccctggtgagccccggtgtcgccatggcaacgcacaaggacgacgaggagcgcttcttcccgagcagcggggtcctgatgtttggcaagcagggcgctggaaaggacaatgtcgagtacaccaacgtgatgctcaccagcgaggaggagatcaagaccaccaaccctgtggccacggagcagtacggcgtggtggctgacaatctgcagcagaccaactcagctcccattgtgggggcagtcaacagccagggggccttacccggtatggtctggcagaaccgggacgtgtacctgcagggtcccatctgggccaagatcccgcatacggacggcaactttcacccgtctcctctcatgggcggctttggactgaaacacccgcctccccagatcctgatcaaaaacacgccggtacctgcggatcccccggtgaactttacggacgctaagctggcgagtttcatcacgcagtacagcaccgggcaggtcagcgtggagattgagtgggagctgcagaaggagaacagcaagcgctggaatcccgagattcagtacacttccaattattataaatcagctaatgtggactttgccgtcaatgcagatggtgtatatagtgaaccccgccccattggcactcgttacctcacccgtaatctgtaa

SEQ ID NO: 82 - DNA, 2196 bp, Adeno-associated virus
atggctgctgacggttatcttccagattggctcgaggacaacctctctgagggcattcgcgagtggtgggcgctgaaacctggagccccgcaacccaaagccaaccagcaaaagcaggacgacggccggggtctggtgcttcctggctacaagtacctcggacccttcaacggactcgacaagggggagcccgtcaacgaggcggacgccgcggccctcgagcacgacaaggcctacgaccagcagctcaaagcgggtgacaatccgtacctgcggtataatcacgccgacgccgagtttcaagagcgtctgcaagaagatacgtcctttgggggcaacctcgggcgagcagtcttccaggccaaaaagagggtactcgagcctctgggtctggttgaggaaggcgctaagacggctcctggaaagaagcggccagtagaaccggactccagctcgggcatcggcaagtcaggccggcagcccgcgaaaaagagactgaattttgggcagactggcgactcagagtcagtgcctgacccccaacctctctcagaaccacccgcaggtccctctggtctgggatctggtacaatggctgcaggcggtggcgctccaatggcagacaataacgaaggcgccgacggagtgggtaatgcctcaggaaattggcattgcgattccacatggctgggcgaccgagtcatcaccaccagcactcggacctgggccctccccacctacaacaaccacctctacaagcaaatctccaacgggacctcgggaggcagcagcaacgacaacacctactttggctacagcaccccctgggggtattttgactttaacagattccactgccacttttcaccacgtgactggcagcgactcatcaacaacaactggggattccggcccaagaggctcaacttcaagctcttcaacatccaggtcaaggaggtcacccagaatgaaggcaccaagaccatcgccaataacctcaccagcacggtgcaggtctttacggactcgaagtaccagctcccgtacgtgctcggctctgcccaccagggctgcctgcctccgttcccggcggacgtgttcatgattccgcagtacgggtacctgacgctgaacaacgggagccaggccgtggggcgatcctccttctactgcctggagtactttccctcgcagatgctgagaacgggcaacaactttaccttcagctacaccttcgaggacgtgcccttccacagcagctacgcgcacagccagagcctggaccggctgatgaacccgctgattgaccagtacctgtactacctgtctcggactcagaccaacgggaccaatgccacgcagactctgttgtttgctcaggccgggcctcagaacatgtcggctcaggccaagaactggctgcctggtccttgctatcggcagcagcgcgtctctacgacagtgtcgcaaaacaacaacagcaactttacctggaccggggcgaccaagtaccacctgaacggccgagactccctggtgaaccccggtgtcgccatggcaacgcacaaggacgacgaggagcgcttcttcccgagcagcggggtcctgatgtttggcaagcagggcgctggaaaggacaatgtcgagtacaccaacgtgatgctcaccagcgaggaggagatcaagaccaccaaccctgtggccacggagcagtacggtgtggtggctgacaatctgcagcagaccaactcggctcccattgtgggggcagtcaacagccagggggccttacccggtatggtctggcagaaccgggacgtgtacctgcagggtcccatctgggccaagatcccgcatacggacggcaactttcacccgtctcctctcatgggcggctttggactgaaacacccgcctccccagatcctgatcaaaaacacgccggtacctgcggatcccccggtgaactttacggacgctaagctggcgagtttcatcacgcagtacagcaccgggcaggtcagcgtggagattgagtgggagctgcagaaggagaacagcaagcgctggaatcccgagattcagtacacttccaattattataaatcagctaatgtggactttgccgtcaatgcagatggtgtatatagtgaaccccgccccattggcactcgttacctcacccgtaatctgtaa

SEQ ID NO: 83 - DNA, 2196 bp, Adeno-associated virus
atggctgctgacggttatcttccagattggctcgaggacaacctctctgagggcattcgcgagtggtgggcgctgaaacctggagccccgcaacccaaagccaaccagcaaaagcaggacgacggccggggtctggtgcttcctggctacaagtacctcggacccttcaacggactcgacaagggggagcccgtcaacgaggcggacgccgcggccctcgagcacgacaaggcctacgaccagcagctcaaagcgggtgacaatccgtacctgcggtataatcacgccgacgccgagtttcaagagcgtctgcaagaagatacgtcctttgggggcaacctcgggcgagcagtcttccaggccaaaaagagggtactcgagcctctgggtctggttgaggaaggcgctaagacggctcctggaaagaagcggccagtagaaccggactccagctcgggcatcggcaagtcaggccagcagcccgcgaaaaagagactgaattttgggccgactggcgactcagagtcagtgcctgacccccaacctctctcagaaccacctgcaggtccctctggtctgggatctggtacaatggctgcaggcggtggcgctccaatggcagacaataacgaaggcgccgacggagtgggtaatgtctcaggaaattggcattgcgattccacatggctgggcgaccgagtcatcaccaccagcactcggacctgggccctccccacctacaacaaccacctctacaagcaaatctccaacgggacctcgggaggcagcagcaacgacaacacctactttggctacagcaccccctgggggtattttgactttaacagattccactgccacttttcaccacgcgactggcagcgactcatcaacaacaactggggattccggcccaagaagctcaacttcaagctcttcaacatccaggtcaaggaggtcacccagaatgaaggcaccaagaccaccgccaataacctcaccagcacggtgcaggtctttacggactcggagtaccagctcccgtacgtgctcggctctgcccaccagggctgcctgcctccgttcccggcggacgtgttcatgattccgcagtacgggtacctgacgctgaacaacgggagccaggccgtggggcgatcctccttctactgcctggagtactttccctcgcagatgctgagaacgggcaacaactttaccttcagctacaccttcgaggacgtgcccttccacagcagctacgcgcacagccagagcctggaccggctgatgaacccgctgattgaccagtacctgtactacctgtctcggactcagaccaacgggaccaatgccacgcagactctgttgtttgctcaggccgggcctcagaacatgtcggctcaggccaagaactggctgcctggtccttgctatcggcagcagcgcgtctctacggcagtgtcgcaaaacaacaacagcaactttacctggaccggggcgaccaagtaccacctgaacggccgagactccctggtgaaccccggtgtcgccatggcaacgcacaaggacgacgaggagcgcttcttcccgagcagcggggtcctgatgtttggcaagcagggcgctggaaaggacaatgtcgagtacaccaacgtgatgctcaccagcgaggaggagatcaagaccaccaaccctgtggccacggagcagtacggtgtggtggctgacaatctgcagcagaccaactcggctcccattgtgggggcagtcaacagccagggggccttacccggtatggtctggcagaaccgggacgtgtacctgcagggtcccatctgggccaagatcccgcatacggacggcaactttcacccgtctcctctcatgggcggctttggactgaaacacccgcctccccagatcctgatcaaaaacacgccggtacctgcggatcccccggtgaactttacggacgctaagctggcgagtttcatcacgcagtacagcaccgggcaggtcagcgtggagattgagtgggagctgcagaaggagaacagcaagcgctggaatcccgagattcagtacacttccaattattataaatcagctaatgtggactttgccgtcaatgcagatggtgtatatagcgaaccccgccccattggcactcgttacctcacccgtaatctgtaa

SEQ ID NO: 84 - DNA, 2214 bp, Adeno-associated virus
atggctgccgatggttatcttccagattggctcgaggacaacctctctgagggcattcgcgagtggtgggcgctgaaacctggagccccgaagcccaaagccaaccagcaaaagcaggacgacggccggggtctggtgcttcctggctacaagtacctcggacccttcaacggactcgacaagggggagcccgtcaacgcggcggacgcagcggccctcgagcacggcaaggcctacgaccagcagctgcaggcgggtgacaatccgtacctgcggtataaccacgccgacgccgagtttcaggagcgtctgcaagaagatacgtcttttgggggcaacctcgggcgagcagtcttccaggccaagaagcgggttctcgaacctctcggtctggttgaggaaggcgctaagacggctcctggaaagaagagaccggtagagccatcaccccagcgttctccagactcctctacgggcatcggcaagaaaggccaacagcccgccagaaaaagactcaattttggtcagactggcgactcagagtcagttccagaccctcaacctctcggagaacctccagcagcgccctctggtgtgggacctaatacaatggctgcaggcggtggcgcaccaatggcagacaataacgaaggcgccgacggagtgggtaattcctcgggaaattggcattgcgattccacatggctgggggacagagtcatcaccaccagcacccgaacctgggcattgcccacctacaacaaccacctctacaagcaaatctccaatggaacatcgggaggaagcaccaacgacaacacctactttggctacagcaccccctgggggtattttgacttcaacagattccactgccacttctcaccacgtgactggcagcgactcatcaacaacaactggggattccggccaaagagactcaacttcaagctgttcaacatccaggtcaaggaggttacgacgaacgaaggcaccaagaccatcgccaataaccttaccagcaccgtccaggtctttacggactcggagtaccagctaccgtacgtcctaggctctgcccaccaaggatgcctgccaccgtttcctgcagacgtcttcatggttcctcagtacggctacctgacgctcaacaatggaagtcaagcgttaggacgttcttctttctactgtctggaatacttcccttctcagatgctgagaaccggcaacaactttcagttcagctacactttcgaggacgtgcctttccacagcagctacgcacacagccagagtctagatcgactgatgaaccccctcatcgaccagtacctatactacctggtcagaacacagacaactggaactgggggaactcaaactttggcattcagccaagcaggccctagctcaatggccaatcaggctagaaactgggtacccgggccttgctaccgtcagcagcgcgtctccacaaccaccaaccaaaataacaacagcaactttgcgtggacgggagctgctaaattcaagctgaacgggagagactcgctaatgaatcctggcgtggctatggcatcgcacaaagacgacgaggaccgcttctttccatcaagtggcgttctcatatttggcaagcaaggagccgggaacgatggagtcgactacagccaggtgctgattacagatgaggaagaaattaaagccaccaaccctgtagccacagaggaatacggagcagtggccatcaacaaccaggccgctaacacgcaggcgcaaactggacttgtgcataaccagggagttattcctggtatggtctggcagaaccgggacgtgtacctgcagggccctatttgggctaaaatacctcacacagatggcaactttcacccgtctcctctgatgggtggatttggactgaaacacccacctccacagattctaattaaaaatacaccagtgccggcagatcctcctcttaccttcaatcaagccaagctgaactctttcatcacgcagtacagcacgggacaagtcagcgtggaaatcgagtgggagctgcagaaagaaaacagcaagcgctggaatccagagatccagtatacttcaaactactacaaatctacaaatgtggactttgctgtcaataccgaaggtgtttactctgagcctcgccccattggtactcgttacctcacccgtaatttgtaa

SEQ ID NO: 85 - DNA, 2217 bp, Adeno-associated virus
atggctgccgatggttatcttccagattggctcgaggacaacctctctgagggcattcgcgagtggtgggacttgaaacctggagccccgaaacccaaagccaaccagcaaaagcaggacgacggccggggtctggtgcttcctggctacaagtacctcggacccttcaacggactcgacaagggggagcccgtcaacgcggcggacgcagcggccctcgagcacgacaaggcctacgaccagcagctcaaagcgggtgacaatccgtacctgcggtataaccacgccgacgccgagtttcaggagcgtctgcaagaagatacgtcttttgggggcaacctcgggcgagcagtcttccaggccaagaagcgggttctcgaacctctcggtctggttgaggaaggcgctaagacggctcctggaaagaagagaccggtagagccatcaccccagcgttctccagactcctctacgggcatcggcaagacaggccagcagcccgcgaaaaagagactcaactttgggcagactggcgactcagagtcagtgcccgaccctcaaccaatcggagaaccccccgcaggcccctctggtctgggatctggtacaatggctgcaggcggtggcgctccaatggcagacaataacgaaggcgccgacggagtgggtagttcctcaggaaattggcattgcgattccacatggctgggcgacagagtcatcaccaccagcacccgaacctgggccctccccacctacaacaaccacctctacaagcaaatctccaacgggacatcgggaggaagcaccaacgacaacacctacttcggctacagcaccccctgggggtattttgactttaacagattccactgccacttctcaccacgtgactggcagcgactcatcaacaacaactggggattccggcccaagagactcaacttcaagctcttcaacatccaggtcaaggaggtcacgcagaatgaaggcaccaagaccatcgccaataaccttaccagcacgattcaggtctttacggactcggaataccagctcccgtacgtcctcggctctgcgcaccagggctgcccgcctccgttcccggcggacgtcttcatgattcctcagtacgggtacctgactctgaacaacggcagtcaggccgtgggccgttcctccttctactgcctggagtactttccttctcaaatgcggagaacgggcaacaactttgagttcagctaccagtttgaggacgtgccttttcacagcagctacgcgcatagccaaagcctggaccggctgatgaaccccctcatcgaccagtacctgtactacctgtctcggactcagtccacgggaggtaccgcaggaactcagcagttgctattttctcaggccgggcctaataacatgtcggctcaggccaaaaactggctacccgggccctgctaccggcagcaacgcgtctccacgacactgtcgcaaaataacaacagcaactttgcttggaccggtgccaccaagtatcatctgaatggcagagactctctggtaaatcccggtgtcgctatggcaacgcacaaggacgacgaagagcgattttttccatccagcggagtcttgatgtttgggaaacagggagctggaaaagacaacgtggactatagcagcgttatgctaaccagtgaggaagaaatcaaaaccaccaacccagtggccacagaacagtacggcgtggtggccgataacctgcaacagcaaaacgccgctcctattgtaggggccgtcaacagtcaaggagccttacctggcatggtctggcagaaccgggacgtgtacctgcagggtcctatctgggccaagattcctcacacggacggcaactttcatccttcgccgctgatgggaggctttggactgaaacacccgcctcctcagatcctgattaagaatacacctgttcccgcggatcctccaactaccttcagtcaagccaagctggcgtcgttcatcacgcagtacagcaccggacaggtcagcgtggaaattgaatgggagctgcagaaagagaacagcaagcgctggaacccagagattcagtatacttccaactactacaaatctacaaatgtggactttgctgtcaatactgagggtacttattcagagcctcgccccattggcacccgttacctcacccgtaacctgtaa

SEQ ID NO: 86 - DNA, 2217 bp, Adeno-associated virus
atggctgctgacggttatcttccagattggctcgaggacaacctctctgagggcattcgcgagtggtgggacctgaaacctggagcccccaagcccaaggccaaccagcagaagcaggacgacggccggggtctggtgcttcctggctacaagtacctcggacccttcaacggactcgacaagggggagcccgtcaacgcggcggacgcagcggccctcgagcacgacaaggcctacgaccagcagctcaaagcgggtgacaatccgtacctgcggtataaccacgccgacgccgagtttcaggagcgtctacaagaagatacgtcttttgggggcaacctcgggcgagcagtcttccaggccaagaagcgggttctcgaacctctcggtctggttgaggaagctgctaagacggctcctggaaagaagagaccggtagaaccgtcacctcagcgttcccccgactcctccacgggcatcggcaagaaaggccagcggcccgctaaaaagagactgaactttggtcagactggcgactcagagtcagtccccgaccctcaaccaatcggagaaccaccagcaggcccctctggtctgggatctggtacaatggctgcaggcggtggcgctccaatggcagacaataacgaaggcgccgacggagtgggtagttcctcaggaaattggcattgcgattccacatggctgggcgacagagtcatcaccaccagcacccgaacctgggccctgcccacctacaacaaccacctctacaagcaaatatccaatgggacatcgggaggaagcaccaacgacaacacctacttcggctacagcaccccctgggggtattttgacttcaacagattccactgccacttctcaccacgtgactggcagcgactcatcaacaacaactggggattccggccaaaaagactcagcttcaagcccttcaacatccaggtcaaggaggtcacgcagaatgaaggcaccaagaccatcgccaataaccttaccagcacgattcaggtatttacggactcggaataccagctgccgtacgtcctcggctccgcgcaccagggctgcctgcctccgttcccggcggacgtcttcatgattccccagtacggctaccttacactgaacaatggaagtcaagccgtaggccgttcctccttctactgcctggaatattttccatctcaaatgctgcgaactggaaacaattttgaattcagctacaccttcgaggacgtgcctttccacagcagctacgcacacagccagagcttggaccgactgatgaatcctctcatcgaccagtacctgcactacttatccagaactcagtccacaggaggaactcaaggtacccagcaattgttattttctcaagctgggcctgcaaacatgtcggctcaggctaagaactggctacctggaccttgctaccggcagcagcgagtctctacgacactgtcgcaaaacaacaacagcaactttgcttggactggtgccaccaaatatcacctgaacggaagagactctttggtaaatcccggtgtcgccatggcaacccacaaggacgacgaggaacgcttcttcccgtcgagtggagtcctgatgtttggaaaacagggtgctggaagagacaatgtggactacagcagcgttatgctaaccagcgaagaagaaattaaaaccactaaccctgtagccacagaacaatacggtgtggtggctgacaacttgcagcaaaccaatacagggcctattgtgggaaatgtcaacagccaaggagccttacctggcatggtctggcagaaccgagacgtgtacctgcagggtcccatctgggccaagattcctcacacggacggcaacttccacccttcaccgctaatgggaggatttggactgaagcacccacctcctcagatcctgatcaagaacacgccggtacctgcggatcctccaacaacgttcagccaggcgaaattggcttccttcattacgcagtacagcaccggacaggtcagcgtggaaatcgagtgggagctgcagaaggagaacagcaaacgctggaacccagagattcagtacacttcaaactactacaaatctacaaatgtggactttgctgtcaatacagagggaacttattctgagcctcgccccattggtactcgctacctcacccgtaatctgtaa

SEQ ID NO: 87 - DNA, 2217 bp, Adeno-associated virus
atggctgctgacggttatcttccagattggctcgaggacaacctctctgagggcattcgcgagtggtgggacctgaaacctggagcccccaagcccaaggccaaccagcagaagcaggacgacggccggggtctggtgcttcctggctacaagtacctcggacccttcaacggactcgacaagggggagcccgtcaacgcggcggacgcagcggccctcgagcacgacaaggcctacgaccagcagctcaaagcgggtgacaatccgtacctgcggtataaccacgccgacgccgagtttcaggagcgtctgcaagaagatacgtcttttgggggcaacctcgggcgagcagtcttccaggccaagaagcgggttctcgaacctctcggtctggttgaggaagctgctaagacggctcctggaaagaagagaccggtagaaccgtcacctcagcgttcccccgactcctccacgggcatcggcaagaaaggccagcagcccgctaaaaagagactgaactttggtcagactggcgactcagagtcagtccccgaccctcaaccaatcggagaaccaccagcaggcccctctggtctgggatctggtacaatggctgcaggcggtggcgctccaatggcagacaataacgaaggcgccgacggagtgggtagttcctcaggaaattggcattgcgattccacatggctgggcgacagagtcatcaccaccagcacccgaacctgggccctgcccacctacaacaaccacctctacaagcaaatatccaatgggacatcgggaggaagcaccaacgacaacacctacttcggctacagcaccccctgggggtattttgacttcaacagattccactgccacttctcaccacgtgactggcagcgactcatcaacaacaactggggattccggccaaaaagactcagcttcaagctcttcaacatccaggtcaaggaggtcacgcaggatgaaggcaccaagaccatcgccaataaccttaccagcacgattcaggtatttacggactcggaataccagctgccgtacgtcctcggctccgcgcaccagggctgcctgcctccgttcccggcggacgtcttcatgattccccagtacggctaccttacactgaacaatggaagtcaagccgtaggccgttcctccttctactgcctggaatattttccatctcaaatgctgcgaactggaaacaattttgaattcagctacaccttcgaggacgtgcctttccacagcagctacgcacacagccagagcttggaccgactgatgaatcctctcatcgaccagtacctgtactacttatccagaactcagtccacaggaggaactcaaggtacccagcaattgttattttctcaagctgggcctgcaaacatgtcggctcgggctaagaactggctacctggaccttgctaccggcagcagcgagtctctacgacactgtcgcaaaacaacaacagcaactttgcttggactggtgccaccaaatatcacctgaacggaagagactctttggtaaatcccggtgttgctatggcaacgcataaggacgacgaggaacgtttctttccatcgagcggagtcctgatgtttggaaaacagggtgctggaagagacaatgtggactatagcagcgttatgctaaccagcgaggaagaaattaaaaccactaaccctgtagccacagaacaatacggtgtggtggctgacaacttgcagcaagccaatacagggcctattgtgggaaatgtcaacagccaaggagccttacctggcatggtctggcagaaccgagacgtgtacctgcagggtcccatctgggccaaaattcctcacacggacggcaattttcacccgtctcctctgatgggcggctttggactgaagcacccacctccccagatcctgatcaagaatacgccggtacctgcggatcctccaacgacgttcagccaggcaaaattggcttccttcatcacgcagtacagcaccggccaggtcagcgtggagatcgagtgggagctgcagaaggagaacagcaagcgatggaacccagaaattcagtacacttccaactactacaaatctacaaatgtggactttgctgtcaattctgagggtacatattcagagcctcgccccattggtactcgttatctgacacgtaatctgtaa

SEQ ID NO: 88 - DNA, 2211 bp, Adeno-associated virus
atggctgccgatggttatcttccagattggctcgaggacaacctctctgagggcattcgcgagtggtgggacttgaaacctggagccccgaaacccaaagccaaccagcaaaagcaggacgacggccggggcctggtgcttcctggctacaagtacctcggacccttcaacggactcgacaagggggagcccgtcaacgcggcggacgcagcggccctcgagcacgacaaggcctacgaccagcagctcgaagcgggtgacaatccgtacctgcggtataaccacgccgacgccgagtttcaggagcgtctgcaagaagatacgtcttttgggggcaacctcgggcgagcagtcttccaggccaagaagcgggttctcgaacctctcggtctggttgaggaaggcgctaagacggctcctggaaagaagagaccagtagagcagtcaccccaagaaccagactcctcctcgggcatcggcaagaaaggccaacagcccgccagaaaaagactcaattttggccagactggcgactcagagtcagttccagaccctcaacctctcggagaacctccagcagcgccctctggtgtgggacctaatacaatggctgcaggcggtggcgcaccaatggcagacaataacgaaggcgccgacggagtgggtagttcctcgggaaattggcattgcgattccacatggctgggcgacagagtcatcaccaccagcacccgaacctgggccctgcccacctacaacaaccacctctacaagcaaatctccaacgggacatcgggaggagccaccaacgacaacacctacttcggctacagcaccccctgggggtattttgactttaacagattccactgccacttttcaccacgtgactggcagcgactcatcaacaacaactggggattccggcccaagagactcagcttcaagctcttcaacatccaggtcaaggaggtcacgcagaatgaaggcaccaagaccatcgccaataacctcaccagcaccatccaggtgtttacggactcggagtaccagctgccgtacgttctcggctctgcccaccagggctgcctgcctccgttcccggcggacgtgttcatgattccccagtacggctacctaacactcaacaacggtagtcaggccgtgggacgctcctccttctactgcctggaatactttccttcgcagatgctgagaaccggcaacaacttccagtttacttacaccttcgaggacgtgcctttccacagcagctacgcccacagccagagcttggaccggctgatgaatcctctgattgaccagtacctgtactacttgtctcggactcaaacaacaggaggcacggcaaatacgcagactctgggcttcagccaaggtgggcctaatacaatggccaatcaggcaaagaactggctgccaggaccctgttaccgccaacaacgcgtctcaacgacaaccgggcaaaacaacaatagcaactttgcctggactgctgggaccaaataccatctgaatggaagaaattcattggctaatcctggcatcgctatggcaacacacaaagacgacgaggagcgttttttcccagtaacgggatcctgtttttggcaacaaaatgctgccagagacaatgcggattacagcgatgtcatgctcaccagcgaggaagaaatcaaaaccactaaccctgtggctacagaggaatacggtatcgtggcagataacttgcagcagcaaaacacggctcctcaaattggaactgtcaacagccagggggccttacccggtatggtctggcagaaccgggacgtgtacctgcagggtcccatctgggccaagattcctcacacggacggcaacttccacccgtctccgctgatgggcggctttggcctgaaacatcctccgcctcagatcctgatcaagaacacgcctgtacctgcggatcctccgaccaccttcaaccagtcaaagctgaactctttcatcacgcaatacagcaccggacaggtcagcgtggaaattgaatgggagctacagaaggaaaacagcaagcgctggaaccccgagatccagtacacctccaactactacaaatctacaagtgtggactttgctgttaatacagaaggcgtgtactctgaaccccgccccattggcacccgttacctcacccgtaatctgtaa

SEQ ID NO: 89 - DNA, 2214 bp, Adeno-associated virus
atggctgctgacggttatcttccagattggctcgaggacaacctctctgagggcattcgcgagtggtgggacctgaaacctggagcccccaagcccaaggccaaccagcagaagcaggacgacggccggggtctggtgcttcctggctacaagtacctcggacccttcaacggactcgacaagggggagcccgtcaacgcggcggacgcagcggccctcgagcacgacaaggcctacgaccagcagctcaaagcgggtgacaatccgtacctgcggtataaccacgccgacgccgagtttcaggagcgtctgcaagaagatacgtcttttgggggcaacctcgggcgagcagtcttccaggccaagaagcgggttctcgaacctctcggtctggttgaggaagctgctaagacggctcctggaaagaagagaccggtagaaccgtcacctcagcgttcccccgactcctccacgggcatcggcaagaaaggccagcagcccgctagaaagagactgaactttgggcagactggcgactcagagtcagtccccgaccctcaaccaatcggagaaccaccagcaggcccctctggtctgggatctggtacaatggctgcaggcggtggcgcaccaatggctgacaataacaagggcgccgacggagtgggtaatgcctcaggaaattggcattgcgattccacatggctgggcgacagagtcatcaccaccagcacccgaacctgggctttgcccacctacaacaaccacctctacaagcaaatctccagtcagtcagcaggtagcaccaacgacaacgtctacttcggctacagcaccccctgggggtattttgacttcaacagattccactgtcacttctcaccacgtgactggcagcggctcatcaacagcaactggggattccggcccaagaagctcaacttcaagctgttcaacatccaggtcaaggaggtcacaacgaatgacggcgtcacgaccatcgccaataaccttaccagcacggttcaggtcttttcggactcggaataccagctgccctacgtcctcggctccgcacaccagggctgcctgcctccgttcccggcggacgtcttcatgattccccagtacggctacctgactctgaacaatggcagccaatcggtgggtcgttcctctttctactgcctggaatatttcccttctcaaatgctgagaacgggcaacaacttcaccttcagctacaccttcgaggacgttcccttccacagcagctacgcacacagccagagcctggaccggctgatgaatcctcttatcgaccagtacctgtattacctggccagaacacagagcaacgcaggaggcacagctggcaatcgggaactgcagttttatcagggcgggcctaccaccatggccgaacaagccaaaaactggctgcctggaccttgcttccggcaacaaagagtctccaagacgctggatcaaaacaacaacagcaactttgcttggactggtgccaccaaataccatctaaatggaagaaattcattggttaatcccggtgtcgccatggcaacccacaaggacgacgaggaacgcttcttcccttcgagcggagtcctgatttttggaaaaactggagcagctaataagactacactggaaaatgtgttaatgacaaatgaagaggaaattcgtcctaccaacccggtagccaccgaggaatacgggactgttagcagcaacctgcaggcggctaacactgcagcccagacacaagttgtcaacaaccagggagccttacctggtatggtctggcagaaccgggacgtgtacctgcagggtcccatctgggccaagattcctcacacggacggcaactttcacccgtctccgctgatgggcggctttggactgaagcatccgcctcctcagatcctgatcaaaaacactcctgttcctgctaatcccccggaggtgtttacgcctgccaagtttgcttctttcatcacacagtacagcaccggccaggtcagcgtggagatcgagtgggagctgcagaaggagaacagcaagcgctggaacccagagattcagtatacctccaattttgacaaacagactggtgtggactttgccgttgacagccagggtgtttattctgagcctcgccccattggtactcgttacctcacccgtaatctgtaa

SEQ ID NO: 90 - DNA, 2217 bp, Adeno-associated virus
atggctgccgatggttatcttccagattggctcgaggacaacctctctgagggcattcgcgagtggtgggacctgaaacctggagccccgaaacccaaagccaaccagcaaaagcaggacgacggccggggtctggtgcttcctggctacaagtacctcggacccttcaacggactcgacaagggggagcccgtcaacgcggcggacgcagcggccctcgagcacgacaaggcctacgaccagcagctcaaagcgggtgacaatccgcacctgcggtataatcacgccgacgccgagtttcaggagcgtctgcaagaagatacgtcttttgggggcaacctcgggcgagcagtcttccaggccaagaagcgggttctcgaacctctcggtctggttgaggaaggcgctaagacggctcctggaaagaagagaccggtagagccgtcaccacagcgttcccccgactcctccacgggcatcggcaagaaaggccagcagcccgccagaaagagactcaatttcggtcagactggcgactcagagtcagtccccgaccctcaacttatcggagaacctccagcagcgccctctagtgtgggatctggtacaatggctgcaggcggtggcgcaccaatggcagacaataacgaaggtgccgacggagtgggtagttcctcgggaaattggcattgcgattccacatggctgggcgacagagtcatcaccaccagcacccgaacctgggccctgcccacctacaacaaccacctctacaagcaaatctccaacgggacctcgggaggcagcaccaacgacaacacctactttggctacagcaccccctgggggtattttgactttaacagattccactgccacttctcaccacgtgactggcagcgactcatcaacaacaactggggattccggcccaagagactcagcttcaagctcttcaacatccaggtcaaagaggtcacgcagaatgaaggcaccaagaccatcgccaataacctcaccagcaccatccaggtgtttacggactcggagtaccagctgccgtacgtcctcggctctgcccaccagggctgcctgcctccgttcccggcggacgtcttcatgattcctcagtacggcaacctgactctcaacaacggtagtcaggccgtgggacgttcctccttctactgcctggagtacttcccctctcagatgctgagaacgggcaacaacttttccttcagctacactttcgaggacgtgcctttccacagcagctacgcgcacagccagagtttggacaggctgatgaatcctctcatcgaccagtacctgtactacctgtcaagaacccagtctacgggaggcacagcgggaacccagcagttgctgttttctcaggccgggcctagcaacatgtcggctcaggccagaaactggctgcctggaccctgctacagacagcagcgcgtctccacgacactgtcgcaaaacaacaacagcaactttgcctggactggtgccaccaagtatcatctgaacggcagagactctctggtgaatccgggcgtcgccatggcaaccaacaaggacgacgaggaccgcttcttcccatccagcggcatcctcatgtttggcaagcagggagctggaaaagacaacatgggctatagcaacgtgatgctaaccagcgaggaagaaatcaagaccaccaaccccgtggccacagaacagtatggcgtggtggctgataacctacagcagcaaaacaccgctcctattgtgggggccgtcaacagccagggagccttacctggcatggtctggcagaaccgggacgtgtacctgcagggtcctatttgggccaagattcctcacacagatggcaactttcacccgtctcctttaatgggcggctttggacttaaacatccgcctcctcagatcctcatcaaaaacactcctgttcctgcggatcctccaacagcgttcaaccaggccaagctgaattctttcatcacgcagtacggcaccggacaagtcagcgtggagatcgagtgggagctgcagaaggagaacagcaagcgctggaacccagagattcagtatacttccaactactacaaatctacaaatgtggactttgctgttaatactgagggtgtttactctgagcctcgccccattggcactcgttacctcacccgtaatctgtaa

SEQ ID NO: 91 - DNA, 2217 bp, Adeno-associated virus
atggctgccgatggttatcttccagattggctcgaggacaacctctctgagggcattcgcgagtggtgggacctgaaacctggagccccgaaacccaaagccaaccagcaaaagcaggacgacggccggggtctggtgcttcctggctacaagtacctcggacccttcaacggactcgacaagggggagcccgtcaacgcggcggacgcagcggccctcgagcacgacaaggcctacgaccagcagctcaaagcgggtgacaatccgtacctgcggtataatcacgccgacgccgagtttcaggagcgtctgcaagaagatacgtcttttgggggcaacctcgggcgagcagtcttccaggccaagaagcgggttctcgaacctctcggtctggttgaggaaggcgctaagacggctcctggaaagaagagaccggtagagccgtcaccacagcgttcccccgactcctccacgggcatcggcaagaaaggccagcagcccgccggaaagagactcaatttcggtcagactggcgactcagagtcagtccccgaccctcaacctatcggagaacctccagcagcgccctctagtgtgggatctggtacaatggctgcaggcggtggcgcaccaatggcagacaataacgaaggtgccgacggagtgggtagttcctcgggaaattggcattgcgattccacatggctgggcgacagagtcatcaccaccagcacccgaacctgggccctgcccacctacaacaaccacctctacaagcaaatctccaacgggacctcgggaggcagcaccaacgacaacacctactttggctacagcaccccctgggggtattttgactttaacagattccactgccacttctcaccacgtgactggcagcgactcatcaacaacaactggggattccggcccaagagactcagcttcaagctcttcaacatccaggtcaaagaggtcacgcagaatgaaggcaccaagaccatcgccaataacctcaccagcaccatccaggtgtttacggactcggaataccagctgccgtacgtcctcggctctgcccaccagggctgcctgcctccgttcccggcggacgtcttcatgattcctcagtacggctacctgactctcaacaacggtagtcaggccgtgggacgttcctccttctactgcctggagtacttcccctctcagatgctgagaacgggcaacaacttttccttcagctacactttcgaggacgtgcctttccacagcagctacgcgcacagccagagtttggacaggctgatgaatcctctcgtcgaccagtacctgtactacctgtcaagaacccagtctacgggaggcacagcgggaacccagcagttgctgttttctcaggccgggcctagcaacatgtcggctcaggccagaaactggctgcctggaccctgctacagacagcagcgcgtctccacgacactgtcgcaaaacaacaacagcaactttgcctggactggtgccaccaagtatcatctgaacggcagagactctctggtgaatccgggcgtcgccatggcaaccaacaaggacgacgaggaccgcttcttcccatccagcggcatcctcatgtttggcaagcagggagctggaaaagacaacgtggactatagcaacgtgatgctaaccagcgaggaagaaatcaagaccaccaaccccgtggccacagaacagtatggcgtggtggctgataacctacagcagcaaaacaccgctcctattgtgggggccgtcaacagccagggagccttacctggcatggtctggcagaaccgggacgtgtacctgcagggtcctatttgggccaagattcctcacacagatggcaactttcacccgtctcctttaatgggcggctttggacttaaacatccgcctcctcagatcctcatcaaaaacactcctgttcctgcggatcctccaacagcgttcaaccaggccaagctgaattctttcatcacgcagtacagcaccggacaagtcagcgtggagatcgagtgggagctgcagaaggagaacagcaagcgctggagcccagagattcagtatacttccaactactacaaatctacaaatgtggactttgctgttaatactgagggtgtttactctgagcctcgccccattggcactcgttacctcacccgtaatctgtaa

SEQ ID NO: 92 - DNA, 2217 bp, Adeno-associated virus
atggttgccgatggttatcttccagattggctcgaggacaacctctctgagggcattcgcgagtggtgggacctgaaacctggagccccgaaacccaaagccaaccagcaaaagcagggcgacggccggggtctggtgcttcctggctacaagtacctcggacccttcaacggactcgacaagggggagcccgtcaacgcggcggacgcagcggccctcgagcacgacaaggcctacgaccagcagcttaaagcgggtgacaatccgtacctgcggtataatcacgccgacgccgagcttcaggagcgtctgcaagaagatacgtcttttgggggcaacctcgggcgagcagtcttccaggccaagaagcgggttctcgaacctctcggtctggttgaggaaggcgctaagacggctcctggaaagaagagaccggtagagccgtcaccacagcgttcccccgactcctccacgggcatcggcaagaaaggccagcagcccgccagaaagagactcaatttcggtcagactggcgactcagagtcagtccccgaccctcaacctatcggagaacctccagcagcgccctctagtgtgggatctggtacaatggctgcaggcggtggcgcgccaatggcagacaataacgaaggtgccgacggagtgggtagttcctcgggaaattggcattgcgattccacatggctgggcgacagagtcatcaccaccagcacccgaacctgggccctgcccacctacaacaaccacctctacaagcaaatctccaacgggacctcgggaggcagcaccaacgacaacacctactttggctacagcaccccctgggggtattttgactttaacagattccactgccacttctcaccacgtgactggcagcgactcatcaacaacaactggggattccggcccaagagactcagcttcaagctcttcaacatccaggtcaaagaggtcacgcagaatgaaggcaccaagaccatcgccaataacctcaccagcaccatccaggtgtttacggactcggaataccagctgccgtacgtcctcggctctgcccaccagggctgccagcctccgttcccggcggacgtcttcatgattcctcagtacggctacctgactctcaacaacggtagtcaggccgtgggacgttcctccttctactgcctggagtacttcccctctcagatgctgagaacgggcaacaacttttccttcagctacactttcgaggacgtgcctttccacagcagctacgcgcacagccagagtttggacaggctgatgaatcctctcatcgaccagtacctgtactacctgtcaagaacccagtctacgggaggcacagcgggaacccagcagttgctgttttctcaggccgggcctagcaacatgtcggctcaggccagaaactggctgcctggaccctgctacagacagcagcgcgtctccacgacactgtcgcaaaacaacaacagcaactttgcctggactggtgccaccaagtatcatctgaacggcagagactctctggtgaatccgggcgtcgccatggcaaccaacaaggacgacgaggaccgcttcttcccatccagcggcatcctcatgtttggcaagcagggagctggaaaagacaacgtggactatagcaacgtgatgctaaccagcgaggaagaaatcaagaccaccaaccccgtggccacagaacagtatggcgtggtggctgataacctacagcagcaaaacaccgctcctattgtgggggccgtcaacagccagggagccttacctggcatggtctggcagaaccgggacgtgtacctgcagggtcctatttgggccaagattcctcacacagatggcaactttcacccgtctcctttaatgggcggctttggacttaaacatccgcctcctcagatcctcatcaaaaacactcctgttcctgcggatcctccaacagcgttcaaccaggccaagctgaattctttcatcacgcagtacagcaccggacaagtcagcgtggagatcgagtgggagccgcagaaggagaacagcaagcgctggaacccagagattcagtatacttccaactactacaaatctacaaatgtggactttgctgttaatactgagggtgtttactctgagcctcgccccattggcactcgttacctcacccgtaatctgtaa

SEQ ID NO: 93 - DNA, 2217 bp, Adeno-associated virus
atggctgccgatggttatcttccagattggctcgaggacaacctctctgagggcattcgcgagtggtgggacctgaaacctggagccccgaaacccaaagccaaccagcaaaagcaggacgacggccggggtctggtgcttcctggctacaagtacctcggacccttcaacggactcgacaagggggagcccgtcaacgcggcggacgcagcggccctcgagcacgacaaggcctacgaccagcagctcaaagcgggtgacaatccgtacctgcggtataatcacgccgacgccgagtttcaggagcgtctgcaagaagatacgtcttttgggggcaacctcgggcgagcagtcttccaggccaagaagcgggttctcgaacctctcggtctggttgaggaaggcgctaagacggctcctggaaagaagagaccggtagagccgtcaccacagcgttcccccgactcctccacgggcatcggcaagaaaggccagcagcccgccagaaagagactcaatttcggtcagactggcgactcagagtcagtccccgaccctcaacctatcggagaacctccagcagcgccctctagtgtgggatctggtacaatggctgcaggcggtggcgcaccaatggcagacaataacgaaggtgccgacggagtgggtagttcctcgggaaattggcattgcgattccacatggctgggcgacagagtcatcaccaccagcacccgaacctgggccctgcccacctacaacaaccacctctacaagcaaatctccaacgggacctcgggaggcagcaccaacgacaacacctactttggctacagcaccccctgggggtattttgactttaacagattccactgccacttctcaccacgtgactggcagcgactcatcaacaacaactggggattccggcccaagagactcagcttcaagctcttcaacatccaggtcaaagaggtcacgcagaatgaaggcaccaagaccatcgccaatagcctcaccagcaccatccaggtgtttacggactcggaataccagctgccgtacgtcctcggctctgcccaccagggctgcctgcctccgttcccggcggacgtcttcatgattcctcagtacggctacctgactcccaacaacggtagtcaggccgtgggacgttcctccttctactgcctggagtacttcccctctcagatgctgagaacgggcaacaacttttccttcagctacactttcgaggacgtgcctttccacagcagctacgcgcacagccagagtttggacaggctgatgaatcctctcatcgaccagtacctgtactacctgtcaagaacccagtctacgggaggcacagcgggaacccagcagttgctgtcttctcaggccgggcctagcaacatgtcggctcaggccagaaactggctgcctggaccctgctacagacagcagcgcgtctccacgacactgtcgcaaaacaacaacagcaactttgcctggactggtgccaccaagtatcatctgaacggcagagactctctggtgaatccgggcgtcgccatggcaaccaacaaggacgacgaggaccgcttcttcccatccagcggcatcctcatgtttggcaagcagggagctggaaaagacaacgtggactatagcaacgtgatgctaaccagcgaggaagaaatcaagaccaccaaccccgtggccacagaacagtatggcgtggtggctgataacctacagcagcaaaacaccgctcctattgtgggggccgtcaacagccagggagccttacctggcatggtctggcagaaccgggacgtgtacttgcagggtcctatttgggccaagattcctcacacagatggcaactttcacccgtctcctttaatgggcggctttggacttaaacatccgcctcctcagatcctcatcaaaaacactcctgttcctgcggatcctccaacagcgttcaaccaggccaagctgaattctttcatcacgcagtacagcaccggacaagtcagcgtggagatcgagtgggagctgcagaaggagaacagcaagcgctggaacccagagattcagtatacttccaactactacaaatctacaaatgtggactttgctgttaatactgagggtgtttactctgagcctcgccccattggcactcgttacctcacccgtaatctgtaa

SEQ ID NO: 94 - DNA, 2217 bp, Adeno-associated virus
atggctgccgatggttatcttccagattggctcgaggacaacctctctgagggcattcgcgagtggtgggacctgaaacctggagccccgaaacccaaagccaaccagcaaaagcaggacgacggccggggtctggtgcttcctggctacaagtacctcggacccttcaacggactcgacaagggggagcccgtcaacgcggcggacgcagcggccctcgagcacgacaaggcctacgaccagcagctcaaagcgggtgacaatccgtacctgcggtataatcacgccgacgccgagtttcaggagcgtctgcaagaagatacgtcttttgggggcaacctcgggcgagcagtcttccaggccaagaagcgggttctcgaacctctcggtctggttgaggaaggcgctaagacggctcctggaaagaagagaccggtagagccgtcaccacagcgttcccccgactcctccacgggcatcggcaagaaaggccagcagcccgccagaaagagactcaatttcggtcagactggcgactcagagtcagtccccgaccctcaacctatcggagaacctccagcagcgccctctagtgtgggatctggtacaatggctgcaggcggtggcgcaccaatggcagacaataacgaaggtgccgacggagtgggtagttcctcgggaaattggcattgcgattccacatggctgggcgacagagtcatcaccaccagcacccgaacctgggccctgcccacctacaacaaccacctctacaagcaaatctccaacgggacctcgggaggcagcaccaacgacaacacctactttggctacagcaccccctgggggtattttgactttaacagattccactgccacttctcaccacgtgactggcagcgactcatcaacaacaactggggattccggcccaagagactcagcttcaagctcttcaacatccaggtcaaagaggtcacgcagaatgaaggcaccaagaccatcgccaataacctcaccagcaccatccaggtgtttacggactcggaataccagctgccgtacgtcctcggctctgcccaccagggctgcctgcctccgttcccggcggacgtcttcatgattcctcagtacggctacctgactctcaacaacggtagtcaggccgtgggacgttcctccttctactgcctggagtacttcccctctcagatgctgagaacgggcaacaacttttccttcagctacactttcgaggacgtgcctttccacagcagctacgtgcacagccagagtttggacaggctgatgaatcctctcatcgaccagtacctgtactacctgtcaagaacccagtctacgggaggcacagcgggaacccagcagttgctgttttctcaggccgggcctagcaacatgtcggctcaggccagaaactggctgcctggaccctgctacagacagcagcgcgtctccacgacactgtcgcaaaacaacaacagcaactttgcctggactggtgccaccaagtatcatctgaacggcagagactctctggtgaattcgggcgtcgccatggcaaccaacaaggacgacgaggaccgcttcttcccatccagcggcatcctcatgtttggcaagcagggagctggaaaagacaacgtggactatagcaacgtgatgctaaccagcgaggaagaaatcaagaccaccaaccccgtggccacagaacagtatggcgtggtggctgataacctacagcagcaaaacaccgctcctattgtgggggccgtcaacagccagggagccttacctggcatggtctggcagaaccgggacgtgtacctgcagggtcctatttgggccaagattcctcacacagatggcaactttcacccgtctcctttaatgggcggctttggacttaaacatccgcctcctcagatcctcatcaaaaacactcctgttcctgcggatcctccaacagcgttcaaccaggccaagctgaattctttcatcacgcagtacagcaccggacaagtcagcgtggagatcgagtgggagctgcagaaggagaacagcaagcgctggaacccagagattcagtatacttccaactactacaaatctacaaatgtggactttgctgttaatactgagggtgtttactctgagcctcgccccattggcactcgttaccccacccgtaatctgtaa

SEQ ID NO: 95 - DNA, 2214 bp, Adeno-associated virus
atggctgctgacggttatcttccagattggctcgaggacaacctctctgagggcattcgcgagtggtgggacctgaaacctggagccccgaaacccaaagccaaccagcagaagcaggacgacggccggggtctggtgcttcctggctacaagtacctcggacccttcaacggactcgacaagggggagcccgtcaacgcggcggacgcagcggccctcgagcacgacaaggcctacgaccagcagctcaaagcgggtgacaatccgtacctgcggtataaccacgccgacgccgagtttcaggagcgtctgcaagaagatacgtcttttgggggcaacctcgggcgagcagtcttccaggccaagaagcgggttctcgaacctctcggtctggttgaggaagctgctaagacggctcctggaaagaagagaccggtagaaccgtcacctcagcgttcccccgactcctccacgggcatcggcaagaaaggccagcagcccgctagaaagagactgaactttgggcagactggcgactcagagtcagtccccgaccctcaacctctcggagaaccaccagcaggcccctctggtctgggatctggtacaatggctgcaggcggtggcgctccaatggcagacaataacgaaggcgccgacggagtgggtaatgcctcaggaaattggcattgcgattccacatggctgggcgacagagtcatcaccaccagcacccgaacctgggctttgcccacctacaacaaccacctctacaagcaaatctccagtcagtcagcaggtagcaccaacgacaacgtctacttcggctacagcaccccctgggggtattttgacttcaacagattccactgtcacttctcaccacgtgactggcagcgactcatcaacaacaactggggattccggcccaagaagctcaacttcaagctcttcaacatccaagtcaaggaggtcacgacgaatgacggcgtcacgaccatcgctaataaccttaccagcacggttcaggtcttttcggactcggagtaccagctgccgtacgtcctcggctctgcccaccagggctgcctgcctccgttcccggcggacgtcttcatgattcctcagtacggctacctgactctgaacaatggcagccaatcggtgggacgttcatccttctactgcctggaatacttcccttctcaggtgctgagaacgggtaacaacttcaccttcagttacaccttcgaggacgtgcctttccacagcagctacgcgcacagccagagcctagaccggctgatgaatcccctcatcgaccagtacctgtattacctggctagaacacagagtaacccaggaggcacatctggcaatcgggaactgcagttttaccagggcgggccttccaccatggccgaacaagccaagaactggttacctggaccttgcttccggcaacaaagagtttccaaaacactggatcaaaacaacaacagcaactttgcttggactggtgccaccaaatatcacctgaacggcagaaactcattggtgaatcctggtgtcgccatggcaactcacaaggacgacgaggaccgctttttcccatccagcggagtcctgatttttggaaaaactggagcaaccaacaagactacattggaaaacgtgttaatgacaaatgaagaagaaattcgtcctactaatcctgtggccacagaagaatacgggatagtcagcagcaatttacaagcggccaatactgcagcccagacacaagttgtcaacaaccagggagccttacctggcatggtctggcagaaccgggacgtgtacctgcagggtcccatctgggccaaaattcctcacacagacggcaactttcacccgtctccgctgatgggcggctttggactgaagcatccgcctcctcagatcctgatcaaaaacactcctgttcctgctaatcccccggaggtgtttacgcctgccaagtttgcttctttcatcacacagtacagcaccggccaggtcagcgtggagatcgagtgggagctgcagaaggagaacagcaagcgctggaacccagagattcagtatacctccaattttgacaaacagactggtgtggactttgccgttgacagccagggtgtttattctgagcctcgccccattggtactcgttacctcacccgtaatctgtaa

SEQ ID NO: 96 - DNA, 2214 bp, Adeno-associated virus
atggctgccgatggttatcttccagattggctcgaggacaacctctctgagggcattcgcgagtggtgggacctgaaacctggagccccgaaacccaaagccaaccagcaaaagcaggacgacggccggggtctggtgcttcctggctacaagtacctcggacccttcaacggactcgacaagggggagcccgtcaacgcggcggacgcagcggccctcgagcacgacaaggcctacgaccagcagctcaaagcgggtgacaatccgtacctgcggtataatcacgccgacgccgagtttcaggagcgtctgcaagaagatacgtcttttgggggcaacctcgggcgagcagtcttccaggccaagaagcgggttctcgaacctctcggtctggttgaggaaggcgctaagacggctcctggaaagaagagaccggtagagccgtcaccacagcgttcccccgactcctccacgggcatcggcaagaaaggccagcagcccgccagaaagagactcaatttcggtcagactggcgactcagagtcagtccccgaccctcaacctatcggagaacctccagcagcgccctctagtgtgggatctggtacaatggctgcaggcggtggcgcaccaatggcagacaataacgaaggtgccgacggagtgggtagttcctcgggaaattggcattgcgattccacacggctgggcgacagagtcatcaccaccagcacccggacctgggctttgcccacctacaacaaccacctctacaagcaaatctccagtcagtcagcaggtagcaccaacgacaacgtctacttcggctacagcaccccctgggggtattttgacttcaacagattccactgtcacttctcaccacgtgactggcagcggctcatcaacaacaactggggattccggcccaagaagctcaacttcaagctgttcaacatccaggtcaaggaggtcacaacgaatgacggcgtcacgaccatcgccaataaccttaccagcacggttcaggtcttttcggactcggaataccagctgccctacgtcctcggctccgcacaccagggctgcctgcctccgttcccggcggacgtcttcatgattccccagtacggctacctgactctgaacaatggcagccaatcggtgggtcgttcctctttctactgcctggaatatttcccttctcaaatgctgagaacgggcaacaacttcaccttcagctacaccttcgaggacgttcccttccacagcagctacgcacacagccagagcctggaccggctgatgaatcctcttatcgaccagtacctgtattacctggccagaacacagagcaacgcaggaggcacagctggcaatcgggaactgcagttttatcagggcgggcctaccaccatggccgaacaagccaaaaactggctgcctggaccttgcttccggcaacgaagagtctccaagacgctggatcaaaacaacaacagcaactttgcttggactggtgccaccaaataccatctaaatggaagaaattcattggttaatcccggtgtcgccatggcaacccacaaggacgacgaggaacgcttcttcccttcgagcggagtcctgatttttggaaaaactggagcagctaataagactacactggaaaatgtgttaatgacaaatgaagaggaaattcgtcctaccaacccggtagccaccgaggaatacgggactgttagcagcaacctgcaggcggctaacactgcagcccagacacaagttgtcaacaaccagggagccttacctggtatggtctggcagaaccgggacgtgtacctgcagggtcccatctgggccaagattcctcacacggacggcaactttcacccgtctccgctgatgggcggctttggactgaagcatccgcctcctcagatcctgatcaaaaacactcctgttcctgctaatcccccggaggtgtttacgcctgccaagtttgcttctttcatcacacagtacagcaccggccaggtcagcgtggagatcgagtgggagctgcagaaggagaacagcaagcgctggaacccagagattcagtatacctccaattttgacaaacagactggtgtggactttgccgttgacagccagggtgtttattctgagcctcgccccattggtactcgttacctcacccgtaatctgtaa

SEQ ID NO: 97 - DNA, 2217 bp, Adeno-associated virus
atggctgccgatggttatcttccagattggctcgaggacaacctctctgagggcattcgcgagtggtgggcgctgaaacctggagccccgaagcccaaagccaaccagcaaaagcaggacgacggccggggtctggtgcttcctggctacaagtacctcggacccttcaacggactcgacaagggggagcccgtcaacgcggcggacgcagcggccctcgagcacgacaaggcctacgaccagcagctgcaggcgggtgacaatccgtacctgcggtataatcacgccgacgccgagtttcaggagcgtctgcaagaagatacgtcttttgggggcaacctcgggcgagcagtcttccaggccaagaagcgggttctcgaacctctcggtctggttgaggaaggcgctaagacggctcctggaaagaagagaccggtagagccgtcaccacagcgttcccccgactcctccacgggcatcggcaagaaaggccagcagcccgccagaaagagactcaatttcggtcagactggcgactcagagtcagtccccgaccctcaacctatcggagaacctccagcagcgccctctagtgtgggatctggtacaatggctgcaggcggtggcgcgccaatggcagacaataacgaaggtgccgacggagtgggtagttcctcgggaaattggcattgcgattccacatggctgggcgacagagtcatcaccaccagcacccgaacctgggccctgcccacctacaacaaccacctctacaagcaaacctccaacgggacctcgggaggcagcaccaacgacaacacctactttggctacagcaccccctgggggtattttgactttaacagattccactgccacttctcaccacgtgactggcagcgactcatcaacaacaactggggattccggcccaagagactcagcttcaagctcttcaacatccaggtcaaagaggtcacgcagaatgaaggcaccaagaccatcgccaataacctcaccagcaccatccaggtgtttacggactcggaataccagctgccgtacgtcctcggctctgcccaccagggctgcctgcctccgttcccggcggacgtcttcatgattcctcagtacggctacctgactctcaacaacggtagtcaggccgtgggacgttcctccttctactgcctggagtacttcccctctcagatgctgagaacgggcaacaacttttccttcagctacactttcgaggacgtgcctttccacagcagctacgcgcacagccagagtttggacaggctgatgaatcctctcatcgaccagtacctgtactacctgtcaagaacccagtctacgggaggcacagcgggaacccagcagttgctgttttctcaggccgggcctagcaacatgtcggctcaggccagaaactggctgcctggaccctgctacagacagcagcgcgtctccacgacactgtcgcaaaacaacaacagcaactttgcctggactggtgccaccaagtatcatctgaacggcagagactctctggtgaatccgggcgtcgccatggcaaccaacaaggacgacgaggaccgcttcttcccatccagcggcatcctcatgtttggcaagcagggagctggaaaagacaacgtggactatagcaacgtgatgctaaccagcgaggaagaaatcaagaccaccaaccccgtggccacagaacagtatggcgtggtggctgataacctacagcagcaaaacaccgctcctattgtgggggccgtcaacagccagggagccttacctggcatggtctggcagaaccgggacgtgtacctgcagggtcctatttgggccaagattcctcacacagatggcaactttcacccgtctcctttaatgggcggctttggacttaaacatccgcctcctcagatcctcatcaaaaacactcctgttcctgcggatcctccaacagcgttcaaccaggccaagctgaattctttcatcacgcagtacagcaccggacaagtcagcgcggagatcgagtgggagctgcagaaggagaacagcaagcgctggaacccagagattcagtatacttccaactactacaaatctacaaatgtggactttgctgttaatactgagggtgtttactctgagcctcgccccattggcactcgttacctcacccgtaatctgtaa

SEQ ID NO: 98 - DNA, 2217 bp, Adeno-associated virus
atggctgctgacggttatcttccagattggctcgaggacaacctctctgagggcattcgcgagtggtgggacctgaaacctggagcccccaagcccaaggccaaccagcagaagcaggacgacggccggggtctggtgcttcctggctacaagtacctcggacccttcaacggactcgacaagggggagcccgtcaacgcggcggacgcagcggccctcgagcacgacaaggcctacgaccagcagctcaaagcgggtgacaatccgtacctgcggtataatcacgccgacgccgagtttcaggagcgtctgcaagaagatacgtcttttgggggcaacctcgggcgagcagtcttccaggccaagaagcgggttctcgaacctctcggtctggttgaggaagctgctaagacggctcctggaaagaagagaccggtagaaccgtcacctcagcgttcccccgactcctccacgggcatcggcaagaaaggccagcagcccgctagaaagagactgaactttgggcagactggcgactcagagtcagtccccgaccctcaaccaatcggagaacctccagcagcgccctctagtgtgggatctggtacaatggccgcaggcggtggcgcaccaatggcagacaataacgaaggtgccgacggagtgggtagttcctcgggaaattggcattgcgattccacatggctgggcgacagagtcatcaccaccagcacccgaacctgggccctgcccacctacaacaaccacctctacaagcaaatctccaacgggacctcgggaggcagcaccaacgacaacacctactttggctacagcaccccctgggggtattttgactttaacagattccactgccacttctcaccacgtgactggcagcgactcatcaacaacaactggggattccggcccaagagactcagcttcaagctcttcaacatccaggtcaaagaggtcacgcagaatgaaggcaccaagaccatcgccaataacctcaccagcaccatccaggtgtttacggactcggaataccagctgccgtacgtcctcggctctgcccaccagggctgcctgcctccgttcccggcggacgtcttcatgattcctcagtacggctacctgactctcaacaacggtagtcaggccgtgggacgttcctccttctactgcctggagtacttcccctctcagatgctgagaacgggcaacaacttttccttcagctacactttcgaggacgtgcctttccacagcagctacgcgcacagccagagtttggacaggctgatgaatcctctcatcgaccagtacctgtactacctgtcaagaacccagtctacgggaggcacagcgggaacccagcagctgctgttttctcaggccgggcctagcaacatgtcggctcaggccagaaactggctgcctggaccctgctacagacagcagcgcgtctccacgacactgtcgcaaaacaacaacagcaactttgcctggactggtgccaccaagtatcatctgaacggcagagactctctggtgaatccgggcgtcgccatggcaaccaacaaggacgacgaggaccgcttcttcccatccagcggcatcctcatgtttggcaagcagggagctggaaaagacaacgtggactatagcaacgtgatgctaaccagcgaggaagaaatcaagaccaccaaccccgtggccacagaacagtatggcgtggtggctgataacctacagcagcaaaacaccgctcctattgtgggggccgtcaacagccagggagccttacctggcatggtctggcagaaccgggacgtgtacctgcagggtcctatttgggccaagattcctcacacagatggcaactttcacccgtctcctttaatgggcggctttggacttaaacatccgcctcctcagatcctcatcaaaagcactcctgttcctgcggatcctccaacagcgttcaaccaggccaagctgaattctttcatcacgcagtacagcaccggacaagtcagcgtggagatcgagtgggagctgcagaaggagaacagcaagtgctggaacccagagattcagtatacttccaactactacaaatctacaaatgtggactttgctgttaatactgagggtgtttactctgagcctcgccccattggcactcgttacctcacccgtaatctgtaa

SEQ ID NO: 99 - DNA, 2208 bp, Adeno-associated virus
atggctgccgatggttatcttccagattggctcgaggacaacctctctgagggcattcacgagtggtgggacccgaaacctggagccccgaaacccaaagccaaccagcaaaagcaggacgacggccggggtctggtgcttcctggctacaagtacctcggacccttcaacggactcgacaagggggagcccgtcaacgcggcggacgcagcggccctcgagcacgacaaggcctacgaccagcagctcaaagcgggtgacaatccgtacctgcggtataatcacgccgacgccgagtttcaggagcgtctgcaagaagatacgtcttttgggggcaacctcgggcgagcagtcttccaggccaagaagcgggttctcgaacctctcggtctggttgaggaaggcgctaagacggctcctggaaagaagagaccggtagagccgtcaccacagcgttcccccgactcctccacgggcatcggcaagaaaggccagcagcccgccagaaagagactcaatttcggtcagactggcgactcagagtcagtccccgaccctcaacctatcggagaacctccagcagcgccctctagtgtgggatctggtacaatggctgcaggcggtggcgcaccaatggcagacaataacgaaggtgccgacggagtgggtagttcctcgggaaattggcattgcgattccacatggctgggcgacagagtcatcaccaccagcacccgaacctgggccctgcccacccacaacaaccacctctacaagcaaatctccaacgggacctcgggaggcagcaccaacgacaacgtctacttcggctacagcaccccctgggggtattttgacttcaacagattccactgtcacttctcaccacgtgaccggcagcgactcatcaacaacaactggggattccggcccaagagactcagcttcaagctcttcaacatccaggtcaaagaggtcacgcagaatgaaggcaccaagaccatcgccaataacctcaccagcaccatccaggtgtttacggactcggaataccagctgccgtacgtcctcggctctgcccaccagggctgcctgcctccgttcccggcggacgtcttcatgattcctcagtacggctacctgactctcaacaacggtagtcaggccgtgggacgttcctccttctactgcctggagtacttcccctctcagatgctgagaacgggcaacaacttttccttcagctacactttcgaggacgtgcctttccacagcagctacgcgcacagccagagtttggacaggctgatgaatcctctcatcgaccagtacctgtactacctgtcaagaacccagtctacggaaggcacagcgggaacccagcagttgctgttttctcaggccgggcctagcaacatgtcggctcaggccagaaactggctgcctggaccctgctacagacagcagcgcgtctccacgacactgtcgcaaaacaacaacagcaactttgcctggactggtgccaccaagtatcatctgaacggcagagactctctggtgaatccgggcgtcgccatggcaacccacaaggacgacgaggaacgcttcttcccttcgagcggagtcctgatttttggaaaaactggagcagctaataagactacactggaaaatgtgttaatgacaaatgaagaggaaattcgtcctaccaacccggtagccaccgaggaatacgggactgttagcagcaacctgcaggcggctaacactgcagcccagacacaagttgtcaacaaccagggagccttacctggtatggtctggcagaaccgggacgtgtacctgcagggtcccatctgggccaagattcctcacacggacggcaactttcacccgtctccgctgatgggcggctttggactgaagcatcctcagatcctgatcaaaaacactcctgttcctgctaatcccccggaggtgtttacgcctgccaagtttgcttctttcatcacacagtacagcaccggccaggtcagcgtggagatcgagtgggagctgcagaaggagaacagcaagcgctggaacccagagattcagtatacctccaattttgacaaacagactggtgtggactttgccgttgacagccagggtgtttattctgagcctcgccccattggtactcgttacctcacccgtaatctgtaa

SEQ ID NO: 100 - DNA, 2217 bp, Adeno-associated virus
atggctgccgatggttatcttccagattggctcgaggacaacctctctgagggcattcgcgagtggtgggacctgaaacctggagccccgaaacccaaggccaaccagcaaaagcaggacgacggccggggtctggtgcttcctggctacaagtacctcggacccttcaacggactcgacaagggggagcccgtcaacgcggcggacgcagcggccctcgagcacgacaaggcctacgaccagcagctcaaagcgggtgacaatccgtacctgcggtataatcacgccgacgccgagtttcaggagcgtctgcaagaagatacgtcttttgggggcaacctcgggcgagcagtcttccaggccaagaagcgggttctcgaacctctcggtctggttgaggaaggcgctaagacggctcctggaaagaagagaccggtagagccgtcaccacagcgttcccccgactcctccacgggcatcggcaagaaaggccagcagcccgccagaaagagactcaatttcggtcagactggcgactcagagtcagtccccgaccctcaacctatcggagaacctccagcagcgccctctagtgtgggatctggtacaatggctgcaggcggtggcgcaccaatggcagacaataacgaaggtgccgacggagtgggtagttcctcgggaaattggcattgcgattccacatggctgggcgacagagtcatcaccaccagcacccgaacctgggccctgcccacctacaacaaccacctctacaagcaaatctccaacgggacctcgggaggcagcaccaacgacaacacctactttggctacagcaccccctgggggtattttgactttaacagattccactgccacttctcaccacgtgactggcagcgacccatcaacaacaactggggattccggcccaagagactcagcttcaagctcttcaacatccaggtcaaagaggtcacgcagaatgaaggcaccaagaccatcgccaataacctcaccagcaccatccaggtgtttacggactcggaataccagctgccgtacgtcctcggctctgcccaccagggctgcctgcctccgttcccggcggacgtcttcatgattcctcagtacggctacctgactctcaacaacggtagtcaggccgtgggacgttcctccttctactgcctggagtacttcccctctcagatgctgagaacgggcaacaacttttccttcagctaccctttcgaggacgtgcctttccacagcagctacgcgcacagccagagtttggacaggctgatgaatcctctcatcgaccagtacctgtactacctgtcaagaacccagtctacgggaggcacagcgggaacccagcagttgctgttttctcaggccgggcctagcaacatgtcggctcaggccagaaactggctgcctggaccctgctacagacagcagcgcgtctccacgacactgtcgcaaaacaacaacagcaactttgcctggactggtgccaccaagtatcatctgaacggcagagactctctggtgaatccgggcgtcgccatggcaaccaacaaggacgacgaggaccgcttcttcccatccagcggcatcctcatgtttggcaagcagggagctggaaaagacaacgtggactatagcaacgtgatgctaaccagcgaggaagaaatcaagaccaccaaccccgtggccacagaacagtatggcgtggtggctgataacctacagcagcaagacaccgctcctattgtgggggccgtcaacagccagggagccttacctggcatggtctggcagaaccgggacgtgtacctgcagggtcctatttgggccaagattcctcacacagatggcaactttcacccgtctcctttaatgggcggctttggacttaaacatccgcctcctcaggtcctcatcaaaaacactcctgttcctgcggatcctccaacagcgttcaaccaggccaagctgaattctttcatcacgcagtacagcaccggacaagtcagcgtggagatcgagtgggagctgcagaaggagaacagcaagcgctggaacccagagattcagtatacttccaactactacaaatctacaaatgtggactttgctgttaatactgagggtgtttactctgagcctcgccccattggcactcgttacctcacccgtaatctgtaa

SEQ ID NO: 101 - DNA, 2214 bp, Adeno-associated virus
atggctgctgacggttatcttccagattggctcgaggacaacctctctgagggcattcgcgagtggtgggacctgaaacctggagcccccaagcccaaggccaaccagcagaagcaggacgacggccggggtctggtgcttcctggctacaagtacctcggacccttcaacggactcgacaagggggagcccgtcaacgcggcggacgcagcggccctcgagcacgacaaggcctacgaccagcagctcaaagcgggtgacaatccgtacctgcggtataaccacgccgacgccgagttccaggagcgtctgcaagaagatacgtcttttgggggcaacctcgggcgagcagtcttccaggccaagaagcgggttctcgaacctctcggtctggctgaggaagctgctaagacggctcctggaaagaagagaccggtagaaccgtcacctcagcgttcccccgactcctccacgggcatcggcaagaaaggccagcagcccgctagaaagagactgaactttgggcagactggcgactcagagtcagtccccgaccctcaaccaatcggagagccaccagcaggcccctctggtctgggatctggtacaatggctgcaggcggtggcgcaccaatggctgacaataacaagggcgccgacggagtgggtaatgcctcaggaaattggcattgcgattccacatggctgggcgacagagtcatcaccaccagcacccgaacctgggctttgcccacctacaacaaccacctctacaagcaaatctccagtcagtcagcaggtagcaccaacgacaacgtctacttcggctacagcaccccctgggggtattttgacttcaacagattccactgtcacttctcaccacgtgactggcagcggctcatcaacaacaactggggattccggcccaagaagctcaacttcaagctgttcaacatccaggtcaaggaggtcacaacgggtgacggcgtcacgaccatcgccaataaccttaccagcacggttcaggtcttttcggactcggaataccagctgccctacgtcctcggctccgcacaccagggctgcctgcctccgttcccggcggacgtcttcatgattccccagtacggctacctgactctgaacaatgacagccaatcggtgggtcgttcctctttctactgcctggaatatttcccttctcaaatgctgagaacgggcaacaacttcaccttcagctacaccttcgaggacgttcccttccacagcagctacgcacacagccagagcctggaccggctgatgaatcctcttatcgaccagtacctgtattacctggccagaacacagagcaacgcaggaggcacagctggcaatcgggaactgcagttttatcagggcgggcctaccaccatggccgaacaagccaaaaactggctgcctggaccttgcttccggcaacaaagagtctccaagacgctggatcaaaacaacaacagcaactttgcttggactggtgccaccaaataccatctaaatggaagaaattcattggttaatcccggtgtcgccatggcaacccacaaggacgacgaggaacgcttcttcccttcgagcggagtcctgatttttggaaaaactggagcagctaataagactacactggaaaatgtgttaatgacaaatgaagaggaaattcgtcctaccaacccggtagccaccgaggaatacgggactgttagcagcaacctgcaggcggctaacactgcagcccagacacaagttgtcaacaaccagggagccttacctggtatggtctggcagaaccgggacgtgtacctgcagggtcccatctgggccaagattcctcacacggacggcaactttcacccgtctccgctgatgggcggctttggactgaagcatccgcctcctcagatcctgatcaaaaacactcctgttcctgctaatcccccggaggtgtttacgcctgccaagtttgcttctttcatcacacagtacagcaccggccaggtcagcgtggagatcgagtgggagctgcagaaggagaacagcaagcgctggaacccagagattcagtatacctccaattttgacaaacagactggtgtggactttgccgttgacagccagggtgtttattctgagcctcgccccattggtactcgttacctcacccgtaatctgtaa

SEQ ID NO: 102 - DNA, 2217 bp, Adeno-associated virus
atggctgccgatggttatcttccagattggctcgaggacaacctctctgagggcattcgcgagtggtgggacctgaaacctggagccccgaaacccaaagccaaccagcaaaagcaggacgacggccggggtctggtgcttcctggctacaagtacctcggacccttcaacggactcgacaagggggagcccgtcaacgcggcggacgcagcggccctcgagcacgacaaggcctacgaccagcagctcaaagcgggtgacaatccgtacctgcggtataatcacgccgacgccgagtttcaggagcgtctgcaagaagatacgtcttttgggggcaacctcgggcgagcagtcttccaggccaagaagcgggttctcgaacctctcggtctggttgaggaaggcgctaagacggctcctggaaagaagagaccggtagagccgtcaccacagcgttcccccgactcctccacgggcatcggcaagaaaggccagcagcccgccagaaagagactcaatttcggtcagactggcgactcagagtcagtccccgaccctcaacctatcggagaacctccagcagcgccctctagtgtgggatctggtacaatggctgcaggcggtggcgcaccaatggcagacaataacgaaggtgccgacggagtgggtagttcctcgggaaattggcattgcgattccacatggctgggcgacagagtcatcaccaccagcacccgaacctgggccctgcccacctacaacaaccacctctacaagcaaatctccaacgggacctcgggaggcagcaccaacgacaacacctactttggctacagcaccccctgggggtattttgactttaacagattccactgccacttctcaccacgtgactggcagcgactcatcaacaacaactggggattccggcccaagagactcagcttcaagctcttcaacatccaggtcaaagaggtcacgcagaatgaaggcaccaagaccatcgccaataacctcaccagcaccatccaggtgtttacggactcggaataccagctgccgtacgtcctcggctctgcccaccagggctgcctgcctccgttcccggcggacgtcttcatgattcctcagtacggctacctgactctcaacaacggtagtcaggccgtgggacgttcctccttctactgcctggagtacttcccctctcagatgctgagaacgggcaacaacttttccttcagctacactttcgaggacgtgcctttccacagcagctacgcgcacagccagagtttggacaggctgatgaatcctctcatcgaccagtacctgtactacctgtcaagaacccagtctacgggaggcacagcgggaacccagcagttgctgttttctcaggccgggcctagcaacatgtcggctcaggccagaaactggctgcctggaccctgctacagacagcagcgcgtctccacgacactgtcgcaaaacaacaacagcaactttgcctggactggtgccaccaagtatcatctgaacggcagagactctctggtgaatccgggcgtcgccatggcaaccaacaaggacgacgaggaccgcttcttcccatccagcggcatcctcatgtttggcaagcagggagctggaaaagacaacgtggactatagcaacgtgatgctaaccagcgaggaagaaatcaagaccaccaaccccgtggccacagaacagtatggcgtggtggctgataacctacagcagcaaaacaccgctcctattgtgggggccgtcaacagccagggagccttacctggcatggtctggcagaaccgggacgtgtacctgcagggtcctatttgggccaagattcctcacacagatggcaactttcacccgtctcctttaatgggcggctttggacttaaacatccgcctcctcagatcctcatcaaaaacactcctgttcctgcggatcctccaacagcgttcaaccaggccaagctgaattctttcatcacgcagtacagcaccggacaagtcagcgtggagatcgtgtgggagctgcagaaggagaacagcaagcgcaggaacccagagattcagtatacttccaactactacaaatctacaaatgtggactttgctgttaatactgagggtgtttactctgagcctcgccccattggcactcgttacctcacccgtaatctgtaa

SEQ ID NO: 103 - DNA, 2208 bp, Adeno-associated virus
atggctgccgatggttatcttccagattggctcgaggacactctctctgaaggaataagacagtggtggaagctcaaacctggcccaccaccaccaaagcccgcagagcggcataaggacgacagcaggggtcttgtgcttcctgggtacaagtacctcggacccttcaacggactcgacaagggggagccggtcaacgaggcagacgccgcggccctcgagcacgacaaggcctacgaccggcagctcgacagcggagacaacccgtacctcaagtacaaccacgccgacgcagagtttcaggagcgccttaaagaagatacgtcttttgggggcaacctcggacgagcagtcttccaggcgaaaaagagggttcttgaacctctgggcctggttgaggaacctgttaagacggctccgggaaaaaagaggccggtagagcactctcctgtggagccagactcctcctcgggaaccggaaaagcgggccagcagcctgcaagaaaaagattaaattttggtcagactggagacgcagactccgtacctgacccccagcctctcggacagccaccagcagccccctctggtctgggatctactacaatggctacaggcagtggcgcaccaatggcagacaataacgagggtgccgatggagtgggtaattcctcaggaaattggcattgcgattcccaatggctgggcgacagagtcatcaccaccagcacccgaacctgggccctgcccacatacaacaaccacctctacaagcaaatctccagccaatcaggagccagcaacgacaaccactactttggctacagcaccccctgggggtattttgacttcaacagattccactgccacttttcaccacgtgactggcaaagactcatcaacaacaactggggattccggcccaaaagactcaacttcaagctctttaatattcaagtcaaagaggtcacgcagaatggcggtacgacgacgattgccaataaccttaccagcacggttcaggtgtttactgactcggagtaccagctcccgtacgtcctgggctcggcgcatcaaggatgcctcccgccgtttccagcggacgtcttcatggtcccacagtatggatacctcaccctgaacaacgggagtcaggcggtaggacgctcttccttttactgcctggagtactttccttctcagatgctgcgtactggaaacaactttcagttcagctacacttttgaagacgtgcctttccacagcagctacgctcacagccagagtctggatcggctgatgaatcctctgatcgaccagtacctgtattatctgaacaagacacaaacaaatagtggaactcttcagcagtctcggctactgtttagccaagctggaccaaccaacatgtctcttcaagctaaaaactggctgcctggaccttgctacagacagcagcgtctgtcaaaacaggcaaacggcaacaacaacagcaactttccctggactgcagctacaaagtatcatctaaatggccgggactcgttggttaatccaggaccagctatggccagtcacaaggatgacgaagaaaagtttttccccatgcatggaaccctgatatttggtaaacaaggaacaaatgccaacgacgcggatttggaaaatgtcatgattacagatgaagaagaaatcagggccaccaatcccgtggctacggagcagtacgggactgtgtcaaataatttgcaaaactcaaacactggtccaactactggaactgtcaatcaccaaggagcgttacctggtatggtgtggcaggatcgagacgtgtacctgcagggacccatttgggccaagattcctcacaccgatggacactttcatccttctccactgacgggaggttttggactcaaacacccgcctcctcagatcatgatcaaaaacactcccgttccagccaatcctcccacaaacttcagttctgccaagtttgcttctttcatcacacagtattccacgggacaggtcagcgtggagatcgagtgggagctgcagaaggagaacagcaaacgctggaatcccgaaattcagtacacttccaactacaacaagtctgttaatgtggactttactgtggacactaatggtgtgtattcagagcctcgccccattggcaccagatacctgactcgtaatctgtaa

SEQ ID NO: 104 - DNA, 2208 bp, Adeno-associated virus
atggctgccgatggttatcttccagattggctcgaggacactctctctgaaggaataagacagtggtggaagctcaaacctggcccaccaccaccaaagctcgcagagcggcatcaggacgacagcaggggtcttgtgcttcctgggtacaagtacctcggacccttcaacggactcgacaaaggagagccggtcaacgaggcagacgccgcggccctcgagcacgacaaggcctacgaccggcagctcgacagcggagacaacccgtacctcaagtacaaccacgccgacgcggagtttcaggagcgtcttaaagaagatacgtcttttgggggcaacctcggacgagcagtcttccaggcgaaaaagagggttcttgaacctctgggcctggttgaggaacctgttaagacggctccgggaaaaaagaggccggtagagcactctcctgtggagccagactcctcctcgggaaccggaaaggcgggccatcagcctgcgagaaagagattgaattttggtcagactggagacgcagactccgtacctgacccccagcctctcggacagccaccagcagcccccacaagtctgggatctactacaatggctacaggcagtggcgcaccaatggcagacaataacgagggtgccgatggagtgggtaattcctcaggaaattggcattgcgattcccaatggctgggcgacagagtcatcaccaccagcacccgaacctgggccctgcccacctacaacaaccacctctacaagcaaatctccagccaatcaggagcctcgaacgacaaccactactttggctacagcaccccctgggggtattttgacttcaacagattccactgtcacttctccccacgtgattggcaaagactcatcaacaacaactggggattccgacccaagagactcaacttcaagctctttaacattcaagtcaaagaggtcacgcagaatgacggtacgacgacgattgccaataaccttaccagcacggttcaggtgtttactgactcggagtaccagctcccgtacgtcctcggctcggcgcatcaaggatgcctcccgccgtttccagcggacgtcttcacggtcccacagtatggatacctcaccctgaacaacgggagtcaggcggtaggacgctcttccttttactgcctggagtactttccttctcagatgctgcgtactggaaacaaccttaccttcagctacacctttgaggacgttcctttccacagcagctacgctcacagccagagtttggaccggctgatgaatcctctgatcgaccagtatctatattatctgaacaggacacaatcaaatagtggaactcttcagcagtctaggctactgtttagccaagctggacccaccagcatgtctcttcaagctaaaaactggctgcctggaccttgctacagacagcagcgtctttcaaagcaggcaaacgacaacaacaacagcaactttccctggactgcggctacaaagtatcatctaaatggccgggactcgttggttaatccaggaccagctatggccagccacaaagacgatgaagaaaagtttttccccatgcatggaaccctgatatttggtaaacaaggaacaaatgctaacgacgcggatttggagcatgttatgattacagatgaagaagaaatcaggaccaccaatcctgtggctacagagcagtacggaaacgtgtcaaataatttgcaaaactcaaatactggtccaactacagaaaatgtcaatcaccagggagcgttacctggtatggtgtggcaggatcgagacgtgtacctgcagggacccatttgggccaagattcctcacaccgacggacactttcacccttctccactgatgggaggttttggactcaaacacccgcctcctcaaatcatgatcaaaaacactcccgttccagccaatcctcccacaaactacagttctgccaagtttgcttctttcatcacacagtattccacgggccaggtcagcgtggagattgagtgggagctgcggaaggagaacagcaaacgctggaaccccgagatccagtatacttccaactacaacaaatctgttaatgtggactttactgtggacactaatggtgtgtattcagagcctcgccccattggcaccagatacctgactcgtaatctgtaa

SEQ ID NO: 105 - DNA, 2208 bp, Adeno-associated virus
atggctgccgatggttatcttccagattggctcgaggacactctctctgaaggaataagacagtggtggaagctcaaacctggcccaccaccaccaaagcccgcagagcggcatcaggacgacagcaggggtcttgtgcttcctgggtacaagtacctcggacccttcaacggactcgacaaaggagagccggtcaacgaggcagacgccgcggccctcgagcacgacaaggcctacgaccggcagctcgacagcggagacaacccgtacctcaagtacaaccacgccgacgcggagtttcaggagcgtcttaaagaagatacgtcttttgggggcaacctcggacgagcagtcttccaggcgaaaaagagggttcttgaacctctgggcctggttgaggaacctgttaagacggctccgggaaaaaagaggccggtagagcactctcctgtggagccagactcctcctcgggaaccggaaaagcgggccatcagcctgcgagaaagagattgaattttggtcagactggagacgcagactccgtacctgacccccagcctctcggacagccaccagcagcccccacaagtttgggatctactacaatggctacaggcagtggcgcaccaatggcagacaataacgagggtgccgatggagtgggtaattcctcaggaaattggcattgcgattcccaatggctgggcgacagagtcatcaccaccagcacccgaacctgggccctgcccacctacaacaaccacctctacaagcaaatctccagccaatcaggagcctcgaacgacaaccactactttggctacagcaccccctgggggtattttgacttcaacagattccactgtcacttctccccacgtgattggcaaagactcatcaacaacaactggggattccgacccaagagactcaacttcaagctctttaacattcaagtcaaggaggtcacgcagaatgacggtacgacgacgattgccaataaccttaccagcacggttcaggtgtttactgactcggagtaccagctcccgtacgtcctcggctcggcgcatcaaggatgcctcccgccgtttccagcggacgtcttcatggtcccacagtatggatacctcaccctgaacaacgggagtcaggcggtaggacgctcttccttttactgcctggagtactttccttctcagatgctgcgtactggaaacaactttaccttcagctacacctttgaggacgttcctttccacagcagctacgctcacagccagagtttggaccggctgatgaatcctctgatcgaccagtatctatattatctgaacaggacacaatcaaatagtggaactcttcagcagtctaggctactgtttagccaagctggacccaccagcatgtctcttcaagctaaaaactggctgcctggaccttgctacagacagcagcgtctttcaaagcaggcaaacgacaacaacaacagcaactttccctggactgcggctacaaagtatcgtctaaatggccgggactcgttggttaatccaggaccagctatggccagccacaaagacgatgaagaaaagtttttccccatgcatggaaccctgatatttggtaaacaaggaacaaatgctaacgacgcggatttggagcatgttatgattacagatgaagaagaaatcaggaccaccaatcctgtggctacagagcagtacggaaacgtgtcaaataatttgcaaaactcaaatactggtccaactacagaaaatgtcaatcaccagggagcgttacctggtatggtgtggcaggatcgagacgtgtacctgcagggacccatttgggccaagattcctcacaccgacggacactttcacccttctccactgatgggaggttttggactcaaacacccgcctcctcaaatcatgatcaaaaacactcccgttccagccaatcctcccacaaacttcagttctgccaagtttgcttctttcatcacacagtattccacgggccaggtcagcgtggagattgagtgggagctgcagaaggagaacagcaaacgctggaaccccgagatccagtatacttccaactacaacaaatctgttaatgtggactttactgtggacactaatggtgtgtattcagagcctcgccccattggcaccagatacctgactcgtaatctgtaa

SEQ ID NO: 106 - DNA, 2208 bp, Adeno-associated virus
atggctgccgatggttatcttccagattggctcgaggacactctctctgaaggaataagacagtggtggaagctcaaacctggcccaccaccaccaaagcccgcagagcggcataaggacgacagcaggggtcttgtgcttcctgggtacaagtacctcggacccttcaacggactcgacaagggagagccggtcaacgaggcagacgccgcggccctcgagcacgacaaggcctacgaccggcagctcgacagcggagacaacccgtacctcaagtacaaccacgccgacgcggagtttcaggagcgccttaaagaagatacgtcttttgggggcaacctcggacgagcagtcttccaggcaaaaaagagggttcttgaacctctgggcctggttgaggagcctgttaaaacggctccgggaaaaaagaggccggtagagcactctcctgcggagccagactcctcctcgggaaccggaaaagcgggccagcagcctgcaagaaaaagattgaatttcggtcagactggagacgcagactccgtacctgacccccagcctctcggacagccaccagcagccccctctggtctgggaactaatacgatggcttcaggcagtggcgcaccaatggcagacaataacgagggcgccgacggagtgggtaattcctcgggaaattggcattgcgattccacatggatgggcgacagagtcatcaccaccagcacccgaacttgggccctgcccacctacaacaaccatctctacaagcaaatctccagccaatcaggagccagcaacgacaaccactactttggctacagcaccccttgggggtattttgacttcaacagattccactgccacttttcaccacgtgactggcaaagactcatcaacaacaactggggattccggcccaagagactcaacttcaagctctttaacattcaagtcaaagaggtcacgcagaatgacggtacgacgacgattgccaataaccttaccagcacggttcaggtgtttactgactcggagtaccagctcccgtacgtcctcggctcggcgcatcaaggatgcctcccgccgttcccagcagacgtcttcatggtgccacagtatggatacctcaccctgaacaacgggagtcaggcagtaggacgctcttcattttactgcctggagtactttccttctcagatgctgcgtaccggaaacaactttaccttcagctacacctttgaggacgttcctttccacagcagctacgctcacagccagagtttggaccgtctcatgaatcctctcatcgaccagtacctgtattacttgagcagaacaaacactccaagcggaaccaccacgcagtccaggcttcagttttctcaggccggagcaagtgacattcgggaccagtctaggaactggcttcctggaccctgttaccgccagcagcgagtatcaaagacatctgcggataacaacaacagtgaatactcgtggactggagctaccaagtaccacctcaatggcagagactctctggtgaatccgggcccggccatggccagccacaaggacgatgaagaaaagttttttcctcagagcggggttctcatctttgggaagcaaggctcagagaaaacaaatgtggacattgaaaaggtcatgattacagacgaagaggaaatcaggaccaccaatcccgtggctacggagcagtatggttctgtatctaccaacctgcagggcggcaacacacaagcagctaccgcagatgtcaacacacaaggcgttcttccaggcatggtctggcaggacagagacgtgtacctgcaggggcccatctgggcaaagattccacacacggacggacattttcacccctctcccctcatgggcggattcggacttaaacaccctcctccacagattctcatcaagaacaccccggtacctgcgaatccttcgaccaccttcagtgcggcaaagtttgcttctttcatcacacagtattccacggggcaggtcagcgtggagatcgagtgggagctgcagaaggagaacagcaaacgctggaatcccgagatccagtacacttccaactacaacaaatctgttaatgtggactttactgttgacactaatggcgtgtattcagagcctcgccccattggcaccagatacctgactcgtaatctgtaa

SEQ ID NO: 107 - DNA, 2208 bp, Adeno-associated virus
atggctgccgatggttatcttccagattggctcgaggacactctctctgaaggaataagacagtggtggaagctcaaacctggcccaccaccaccaaagcccgcagagcggcataaggacgacagcaggggtcttgtgcttcctgggtacaagtacctcggacccttcaacggactctacaagggagagccggtcgacgaggcagacgccgcggccctcgagcacgacaaggcctacgaccggcagctcgacagcggagacaacccgtacctcaagtacaaccacgccgacgcggagtttcaggagcgccttaaagaagatacgtcttttgggggcaacctcggacgagcagtcttccaggccaaaaagagggttcttgaacctctgggcttggttggggagcctgttaaaacggctccgggaaaaaagaggccggtagagcactctcctgtggagccagactcctcctcgggaaccggaaaagcgggcaaccagcctgcaagaaaaagattgaattttggtcagactggagacgcagactccgtacctgacccccagcctctcggacagccaccagcagccccctctggtctgggatctactacaatggctacaggcagtggcgcaccagtggcagacaataacgagggtgccgatggagtgggtaattcctcaggaaattggcattgcgattcccaatggctgggcgacagagtcatcaccaccagcacccgaacctgggctctgcccacctacaataaccacctctacaagcaaatctccagccaatcaggagcctcaaacgacaaccactactttggctacagcaccccctgggggtattttgacttcaacagattccactgccacttttcaccacgtgaccggcaaagactcatcaacaacaactggggattccgaccaaaaagactcaacttcaagctctttaacattcaagtcaaagaggtcacgcagaatgacggtacgacgacgattgccaataaccttaccagcacggttcaggtgtttactgactcggggtaccagctcccgtacgtcctcggcttggcgcatcaaggatgcctcccgccgttcccagcagacgtcttcatggtgccacagtatggatacctcaccctgaacaacgggagtcaggcggtaggacgctcttccttttactgcctggagtactttccttctcagatgctgcgtactggaaacaactttcagttcagctacacctttgaagacgttcctttccacagcagctacgctcacagccagagtctggatcggctgatgaatcctctgatcgaccagtacctgtattatctgaacaagacacaatcaaatagtggaactcttcagcagtctcggctactgtttagccaagctggacccaccagcatgtctcttcaagctaaaaactggctgcctggaccttgctacagacagcagcgtctgtcaaagcaggcaaacgacaacaacaacagcaactttccctggactgcggctacaaagtatcatctaaatggccgggactcgttggttaatccaggaccagctatggccagccacaaagacgatgaagaaaagtttttccccatgcatggaaccctgatatttggtaaacaaggaacaaatgctaacgacgcggatttggacaatgtcatgattacagatgaagaagaaatccgcaccaccaatcccgtggctacggagcagtacggatatgtgtcaaataatttgcaaaactcaaatactggtccaactactggaactgtcaatcaccaaggagcgttacctggtatggtgtggcaggatcgagacgtgtacctgcagggacccatttgggccaagattcctcacaccgatggacactttcatccttctccacttatgggaggttttggactcaaacacccacctcctcagatcatgattaaaaacactcccgttccagccaatcctcccacaaacttcagttctgccaagtttgcttctttcatcacacagtattccacgggacaagtcagcgtggagatcgagtgggagctgcagaaggaggacagcaaacgctggaaccccgagatccagtacacttccaactataacaaacctgttaatgtggactttactgtggacactaatggtgtgtattcagagcctcgccccattggcaccagatacctgactcgtaatctgtaa

SEQ ID NO: 108 - DNA, 2208 bp, Adeno-associated virus
atggctgccgatggttatcttccagattggctcgaggacactctctctgaaggaataagacagtggtggaagctcaaacctggcccaccaccgccaaagcccgcagagcggcataaggacgacagcaggggtcttgtgcttcctgggtacaagtacctcggacccttcaacggactctacaagggagagccggtcaacgaggcagacgccgcggccctcgagcacgacaaggcctacgaccggcagctcgacagcggagacaacccgtacctcaagtacaaccacgccggcgcggagtttcaggagcgccttaaagaagatacgtcttttgggggcaacctcggacgagcagtcttccaggccaaaaagagggttcttgaacctctgggcttggttgaggagcctgttaaaacggctccgggaaaaaagaggccggtagagcactctcctgtggagccagactcctcctcgggaaccggaaaagcgggcaaccagcctgcaagaaaaagattgaattttggtcagactggagacgcagactccgtacctgacccccagcctctcggacagccaccagcagccccctctggtctgggatctactacaatggctacaggcagtggcgcaccagtggcagacaataacgagggtgccgatggagtgggtaattcctcaggaaattggcattgcgattcccaatggctgggcgacagagtcatcaccaccagcacccgaacctgggctctgcccacctacaacaaccacctctacaagcaaatctccagccaatcaggagcctcaaacgacaaccactactttggctacagcaccccctgggggtattttgacttcaacagattccactgccacttttcaccacgtgactggcaaagactcatcaacaacaactggggattccgaccaaagagactcaacttcaagctctttaacattcaagtcaaagaggtcacgcagaatgacggtacgacgacgattgccaataaccttaccagcacggttcaggtgtttactgactcggagtaccagctcccgtacgtcctcggctcggcgcatcaaggatgcctcccgccgttcccagcagacgtcttcatggtgccacagtatggatacctcaccctgaacaacgggagtcaggcggtaggacgctcttccttttactgcctggagtactttccttctcagatgctgcgtactggaaacaactttcagttcagctacacctttgaagacgttcctttccacagcagctacgctcacagccagagtctggatcggctgatgaatcctctgatcgaccagtacctgtattatctgaacaagacacaatcaaatagtggaacccttcagcagtctcggctactgtttagccaagctggacccaccagcatgtctcttcaagctaaaaactggctgcctggaccttgctacagacagcagcgtctgtcaaagcaggcaaacgacaacaacaacagcaactttccctggactgcggctacaaagtatcatctaaatggccgggactcgttggttaatccaggaccagctatggccagccacaaagacgatgaagaaaagtttttccccatgcatggaaccctgatatttggtaaacaaggaacaaatgctaacgacgcggatttggacaatgtcatgattacagatgaagaagaaatccgcaccaccaatcccgtggctacggagcagtacggatatgtgtcaaataatttgcaagactcaaatactggtccaactactggaactgtcaatcaccaaggagcgttacctggtatggtgtggcaggatcgagacgtgtacctgcagggacccatttgggccaagattcctcacaccgatggacactttcatccttctccacttatgggaggttttggactcaaacacccacctcctcagatcatgattaaaaacactcccgttccagccaatcctcccacaaacttcagttctgccaagtttgcttctttcatcacacagtattccacgggacaagtcagcgtagagatcgagtgggagctgcagaaggagaacagcaaacgctggaaccccgagatccagtacacttccaactataacaaatctgttaatgtggactttactgtggacactaatggtgtgtattcagagcctcgccccattggcaccagatacctgactcgtaatctgtaa

SEQ ID NO: 109 - DNA, 2217 bp, Adeno-associated virus
atggctgccgatggttatcttccagattggctcgaggacaacctctctgagggcattcgcgagtggtgggacttgaaacctggagccccgaaacccaaagccaaccagcaaaagcaggacgacggccggggtctggtgcttcctggctgcaagtacctcggacccttcaacggactcgacaagggggagcccgtcaacgcggcggacgcagcggccctcgagcacgacaaggcctacgaccagcagctcaaagcgggtgacaatccgtacctgcggtataaccacgccgacgccgagtttcaggagcgtctgcaagaagatacgtcttttgggggcaacctcgggcgagcagtcttccaggccaagaagcgggttctcgaacctctcggtctggttgaggaaggcgctaagacggctcctggaaagaagagaccggtagagccatcaccccagcgttctccagactcctctacgggcatcggcaagacaggccagcagcccgcgaaaaagagactcaactttgggcagactggcgactcagagtcagtgcccgaccctcaaccaatcggagaaccccccgcaggcccctctggtctgggatctggtacaatggctgcaggcggtggcgctccaatggcagacaataacgaaggcgccgacggagtgggtagttcctcaggaaattggcattgcgattccacatggctgggcgacagagtcatcaccaccagcacccgaacctgggccctccccacctacaacaaccacctctacaagcaaatctccaacgggacatcgggaggaagcaccaacgacaacacctacttcggctacagcaccccctgggggtattttgactttaacagattccactgccacttctcaccacgtgactggcagcgactcatcaacaacaactggggattccggcccaagagactcaacttcaagctcttcaacatccaggtcaaggaggtcacgcagaatgaaggcaccaagaccatcgccaataaccttaccagcacgattcaggtctttacggactcggaataccagctcccgtacgtcctcggctctgcgcaccagggctgcccgcctccgttcccggcggacgtcttcatgattcctcagtacgggtacctgactctgaacaacggcagtcaggccgtgggccgttcctccttctactgcctggagtactttccttctcaaatgcggagaacgggcaacaactttgagttcagctaccagtttgaggacgtgccttttcacagcagctacgcgcatagccaaagcctggaccggctgatgaaccccctcatcgaccagtacctgtactacctgtctcggactcagtccacgggaggtaccgcaggaactcagcagttgctattttctcaggccgggcctaataacatgtcggctcaggccaaaaactggctacccgggccctgctaccggcagcaacgcgtctccacgacactgtcgcaaaataacaacagcaactttgcttggaccggtgccaccaagtatcatctgaatggcagagactctctggtaaatcccggtgtcgctatggcaacgcacaaggacgacgaagagcgattttttccatccagcggagtcttgatgtttgggaaacagggagctggaaaagacaacgtggactatagcagcgttatgctaaccagtgaggaagaaatcaaaaccaccaacccagtggccacagaacagtacggcgtggtggccgataacctgcaacagcaaaacgccgctcctattgtaggggccgtcaacagtcaaggagccttacctggcatggtctggcagaaccgggacgtgtacctgcagggtcctatctgggccaagattcctcacacggacggcaactttcatccttcgccgctgatgggaggctttggactgaaacacccgcctcctcagatcctgattaagaatacacctgttcccgcggatcctccaactaccttcagtcaagccaagctggcgtcgttcatcacgcagtacagcaccggacaggtcagcgtggaaattgaatgggagctgcagaaagagaacagcaagcgctggaacccagagattcagtatacttccaactataacaaatctgttaatgtggactttactgtggacactaatggtgtgtattcagagcctcgccccattggcaccagatacctgactcgtaatctgtaa

SEQ ID NO: 110 - DNA, 2208 bp, Adeno-associated virus
atggctgccgatggttatcttccagattggctcgaggacactctctctgaaggaataagacagtggtggaagctcaaacctggcccaccaccaccaaagcccgcagagcggcataaggacgacagcaggggtcttgtgcttcctgggtacaagtacctcggacccttcaacggactcgacaagggagagccggtcaacgaggcagacgccgcggccctcgagcacgacaaggcctacgaccggcagctcgaaagcggagacaacccgtacctcaagtacaaccacgccgacgcggagtttcaggagcgtcttaaagaagatacgtcttttgggggcaacctcggacgagcagtcttccaggcgaaaaagagggttcttgaacctctgggcctggttgaggagcctgttaaaacggctccgggaaaaaagaggccggtagagcactctcctgtggagccagactcctcctcgggaaccggaaaagcgggccagcagcctgcgagaaaaagattgaattttggtcagactggagacgcagactccgtacctgacccccagcctctcggacagccaccagcagccccctctggtctgggatctactacaatggcttcaggcagtggcgcaccagtggcagacaataacgagggtgccgatggagtgggtaattcctcaggaaattggcattgcgattcccaatggctgggcgacagagtcatcaccaccagcacccgaacctgggccctgcccacctacaacaaccacctctacaagcaaatctccagccaatcaggagcctcaaacgacaaccactactttggctacagcaccccctgggggtattttgacttcaacagattccactgccacttttcaccacgtgactggcaaagactcatcaacaacagctggggattccgacccaaaagactcaacttcaagctctttaacattcaagtcaaagaggtcacgcagaatgacggtacgacgacgattgccaataaccttaccagcacggttcaagtgtttaccgactcggagtaccagctcccgtacgtcctcggctcggcgcatcaaggatgcctcccgccgttcccagcagacgtctttatggtcccacagtatggatacctcaccctgaacaacgggagtcaggcggtaggacgctcttccttttactgcctggagtactttccttctcagatgctgcgtactggaaacaactttcagttcagctacacctttgaagacgttcccttccacagcagctacgctcacagccagagtctggatcggctgctgaatcctctgatcgaccagtacctatattatctgaacaagacacaatcaaatagtggaactcttcagcagtctcggctactgtttagccaagctggacccaccagcatgtctcttcaagctaaaaactggctgcctggaccttgctacagacagcagcgtctgtcaaagcaggcaaacgacaacaacaacagcaactttccctggactgcggctacaaagtatcatctaaatggccgggactcgttggttaatccaggaccagctatggccagccacaaagacgatgaagaaaagtttttccccatgcatggaaccctgatatttggtaaacaaggaacaaatgctaacgacgcggatttggacaatgtcatgattacagatgaagaagaaatccgcaccaccaatcccgtggctacggagcagtacggatatgtgtcaaataatttgcaaaactcaaatactggtccaactactggaactgtcaatcaccaaggagcgttacctggtatggtgtggcaggatcgagacgtgtacctgcagggacccatttgggccaagattcctcacacggacgggcactttcatccttctccactaatgggaggttttgggctcaaacacccgcctcctcagatcatgatcaaaaacactcccgttccagccaatcctcctacaaacttcagttcttccaagtttgcttctttcatcacacagtattccacggggcaggtcagcgtggagatcgagtgggagctgcagaaggagaacagcaaacgctggaatcccgaaattcagtatacttccaactacaacaaatctgttaatgtggactttactgtggacactaatggtgtgtattcagagcctcgccccattggcaccagatacccgactcgtaatctgtaa

SEQ ID NO: 111 - DNA, 2208 bp, Adeno-associated virus
atggctgccgatggttatcttccagattggctcgaggacactctctctgaaggaataagacagtggtggaagctcaaacctggcccaccaccaccaaagcccgcagagcggcataaggacgacagcaggggtcttgtgcttcctgggtacaagtacctcggacccttcaacggactcgacaagggagagccggtcaacgaggcagacgccgcggccctcgagcacgacaaggcctacgaccggcagctcgacagcggagacaacccgtacctcaagtacaaccacgccgacgcggagtttcaggagcgtcttaaagaagatacgtcttttgggggcaacctcggacgagcagtcttccaggccaaaaagaggattcttgaacctctgggcctggttgaggaacctgttaagacggctccgggagaaaagaggccggtagagcactctcctgcggagccagactcctcctcgggaaccggaaaagcgggccagcagcctgcaagaaagagattgaattttggccagactggagacgcagactcagtacctgacccccagcctctcggacagccaccagcagccccctctggtctgggaactaatacgatggcttcaggcagtggcgcaccaatggcagacaataacgagggcgccgacggagtgggtaattcctcgggaaattggtattgcgattccacatggatgggcgacagagtcatcaccaccagcacccgcacctgggccctgcccacctacaacaaccatctgtacaagcaaatctccagccagtctggagccagcaacgacaaccactactttggctacagcaccccctgggggtattttgacttcaacagattccactgccacttctccccacgtgactggcaaagactcatcaacaacaactggggattccggcccaagagactcagcttcaagctctttaacattcaagtcaaagaggtcacgcagaatgacggtacgacgacgattgccaataaccttaccagcacggttcaggtgtttactgactcggagtaccagctcccgtacgtcctcggctcggcgcatcaaggatgcctcccgccgttcccagcagacgtcttcatggtgccacagtatggatacctcaccctgaacaacggcagtcaggcggtaggacgctcttccttttactgcctggagtactttccttctcagatgcttcgtaccggaaacaactttaccttcagctacacctttgaagacgttcctttccatagcagctacgctcacagccaaagtctggaccgtctcatgaatcctctcatcgaccagtacctgtattacttgagcagaacaaacactccaagcggaaccaccacgatgtccaggcttcagttttctcaggccggagcaagtgacattcgggaccagtctagaaactggcttcctggaccctgttaccgccagcagcgagtatcaaagacagctgcggacaacaacaacagtgattactcgtggactggagctaccaagtaccacctcaatggaagagactctctggtgaatccgggcccagctatggccagccacaaggacgatgaagaaaaatattttcctcagagcggggttctcatctttggaaaacaagactcgggaaaaactaatgtggacattgaaaaggttatgattacagacgaagaggaaatcaggaccaccaatcccgtggctacggagcagtatggttctgtatctaccaacctccagagcggcaacacacaagcagctacctcagatgtcaacacacaaggcgttcttccaggcatggtctggcaggacagagacgtgtacctgcaggggcccatctgggcaaagattccacacacggacggacattttcacccctctcccctcgtgggcggattcggacttaaacaccctcctccacaaattctcatcaagaacaccccggtacctgcgaatccttcgaccactttcagtgcggcaaagtttgcttccttcatcacacagtactccacggggcaggtcagcgtggagatcgagtgggagctgcagaaggagaacagcaaacgctggaatcccgaaattcagtacacttccaactacaacaaatctgttaatgtggactttactgtggacactaatggtgtgtattcagagcctcgccccattggcaccagatacctgactcgtaatctgtaa

SEQ ID NO: 112 - DNA, 2209 bp, Adeno-associated virus
atggctgccgatggttatcctccagattggctcgaggacactctctctgaagggataagacagtggtggaagctcaaacctggcccaccaccaccaaagcccgcagagcggcataaggacgacagcaggggtcttgtgcttcctgggtacaagtacctcggacccttcaacggactcgacaagggggagccggtcaacgaggcagacgccgcggccctcgagcacgacaaggcctacgaccggcagctcgacagcggagacaacccgtacctcaagtacaaccacgccgacgcagagtttcaggagcgccttaaagaagatacgtcttttgggggcaacctcggacgagcagtcttccaggcgaaaaagagggttcttgaacctctgggcctggttgaggaacctgttaagacggctccgggaaaaaagaggccggtagagcactctcctgtggagccagactcctcctcgggaaccggaaaagcgggccagcggcctgcaagaaaaagattaaattttggtcagactggagacgcagactccgtacctgacccccagcctctcggacagccaccagcagccccctctggtctgggatctactacaatggctacaggcagtggcgcaccaatggcagacaataacgagggtgccgatggagtgggtaattcctcaggaaattggcattgcgattcccaatggctgggcgacagagtcatcaccaccagcacccgaacctgggccctgcccacatacaacaaccacctctacaagcaaatctccagccaatcaggagccagcaacgacaaccactactttggctacagcaccccctgggggtattttgacttcaacagattccactgccacttttcaccacgtgactggcaaagactcatcaacaacaactggggattccggcccaaaagactcaacttcaagctctttaatattcaagtcaaagaggtcacgcagaatgacggtacgacgacgattgccaataaccttaccagcacggttcaggtgtttactgactcggagtaccagctcccgtacgtcctgggctcggcgcatcaaggatgcctcccgccgtttccagcggacgtcttcatggtcccacagtatggatacctcaccctgaacaacgggagtcaggcggtaggacgctcttccttttactgcctggagtactttccttctcagatgctgcgtactggaaacaactttcagttcagctacacttttgaagacgtgcctttccacagcagctacgctcacagccagagtctggatcggctgatgaatcctctgatcgaccagtacctgtattatctgaacaagacacaaacaaatagtggaactcttcagcagtctcggctactgtttagccaagctggaccaaccaacatgtctcttcaagctaaaaactggctgcctggaccttgctacagacagcagcgtctgtcaaaacaggcaaacgacaacaacaacagcaactttccctggactgcagctacaaagtatcatctaaatggccgggactcgttggttaatccaggaccagctatggccagtcacaaggatgacgaagaaaagtttttccccatgcatggaaccctgatatttggtaaacaaggaacaaatgccaacgacgcggatttggaaaatgtcatgattacagatgaagaagaaatcagggccaccaatcccgtggctacggagcagtacgggactgtgtcaaataatttgcaaaactcaaacactggtccaactactggaactgtcaatcgccaaggagcgttacctggtatggtgtggcaggatcgagacgtgtacctgcagggacccatttgggccaagattcctcacaccgatggacactttcatccttctccactgatgggaggttttggactcaaacacccgcctcctcagatcatgatcaaaaacactcccgttccagccaatcctcccacaaacttcagttctgccaagtttgcttctttcatcacacagtattccacgggacaggtcagcgtggagatcgagtgggagctgcagaaggagaacagcaaacgctggaatcccgaaattcagtacacttccaactacaacaagtctgttaatgtggactttactgtggacactaatggtgtgtattcagagcctcgccccattggcaccagatacctgactcgtaatctgtaat

SEQ ID NO: 113 - DNA, 2208 bp, Adeno-associated virus
atggctgccgatggttatcttccagattggctcgaggacactctctctgaaggaataagacagtggtggaagctcaaacctggcccaccaccaccaaagcccgcagagcggcataaggacgacagcaggggtcttgtgcttcctgggtacaggtacctcggacccttcaacggactcgacaagggagagccggtcaacgaggcagacgccgcggccctcgagcacgacaaggcctacgaccggcagctcgacagcggagacaacccgtacctcaagtacaaccacgtcgacgcggagtttcaggagcgtcttaaagaagatacgtcttttgggggcaacctcggacgagcagtcttccaggccaaaaagaggattcttgaacctctgggcctggttgaggaacctgttaaggcggctccgggagaaaagaggccggtagagcactctcctgcggagccagactcctcctcgggaaccggaaaagcgggccagcagcctgcaagaaagagattgaattttggtcagactggagacgcagactcagtacctgacccccagcctctcggacagccaccagcagccccctctggtctgggaactaatacgatggcttcaggcagtggcgcaccaatggcagacaataacgagggcgccgacggagtgggtaattcctcgggaaattggcattgcgattccacatggatgggcgacagagtcatcaccaccagcacccgcacctgggccctgcccacctacaacaaccatctgtacaagcaaatctccagccagtctggagccagcaacgacaaccactactttggctacagcaccccctgggggcattttgacttcaacagattccactgccacttctccccacgtgactggcaaagactcatcaacaacaactggggattccggcccaagagactcagcttcaagctctttaacattcaagtcaaagaggtcacgcagaatgacggtacgacgacgattgccaataaccttaccagcacggttcaggtgtttactgactcggagtaccagctcccgtacgtcctcggctcggcgcatcaaggatgcctcccgccgttcccagcagacgtcttcatggtgccacagtatggatacctcaccctgaacaacggcagtcaggcggtaggacgctcttccttttactgcctggagtactttccttctcagatgcttcgtaccggaaacaactttaccttcagctacacctttgaagacgttcctttccatagcagctacgctcacagccaaagtctggaccgtctcatgaatcctctcatcgaccagtacctgtattacttgagcagaacaaacactccaagcggaaccaccacgatgtccaggcttcagttttctcaggccggagcaagtgacattcgggaccagtctagaaactggcttcctggaccctgttaccgccagcagcgagtatcaaagacagctgcggacaacaacaacagtgattactcgtggactggagctaccaagtaccacctcaatggaagagactctctggtgaatccgggcccagctatggccagccacaaggacgatgaagaaaaatattttcctcagagcggggttctcatctttggaaaacaagactcgggaaaaactaatgtggacattgaaaaggttatgattacagacgaagaggaaatcaggaccaccaatcccgtggctacggagcagtatggttctgtatctaccaacctccagagcggcaacacacaagcagctacctcagatgtcaacacacaaggcgttcttccaggcatggtctggcaggacagagacgtgtacctgcaggggcccatctgggcaaagattccacacacggacggacattttcacccctctccccccatgggcggattcggacttaaacaccctcctccacaaattctcatcaagaacaccccggtacctgcgaatccttcgaccactttcagtgcggcaaagtttgcttccttcatcacacagtactccacggggcaggtcagcgtggagatcgagtgggagctgcagaaggagaacagcaaacgctggaatcccgaaattcagtacacttccaactacaacaaatctgttaatgtggactttactgtggacactaatggtgtgtattcagagcctcgccccattggcgccagatacctgactcgtaatctgtaa

SEQ ID NO: 114 - DNA, 2208 bp, Adeno-associated virus
atggctgccgatggttatcttccagattggctcgaggacaccctctctgaaggaataagacagtggtggaagctcaaacctggcccaccaccaccaaagcccgcagagcggcataaggacgacagcaggggtcttgtgcttcctgggtacaagtacctcggacccttcaacggactcgacaagggagagccggtcaacgaggcagacgccgcggccctcgagcacgacaaggcctacgaccggcagctcgacagcggagataacccgtacctcaagtacaaccacgccgacgcggagtttcaggagcgccttaaagaggatacgtcttttgggggcaacctcggacgagcagtcttccaggccaaaaagaggattcttgaacctctgggcctggttgaggaacctgttaagacggctccgggaaaaaagaggccggtagagcactctcctgcggagccagactcctcctcgggaaccggaaaagcgggccagcagcctgcaagaaagagattgaattttggtcagactggagacgcagactcagtacctgacccccggcctctcggacagccaccagcagccccctctggtctgggaactaatacgatggcttcaggcagtggcgcaccaatggcagacaataacgagggcgccgacggagtgggtaattcctcgggaaattggcattgcgattccacatggatgggcgacagagtcatcaccaccagcacccgcacctgggccctgcccacctacaacaaccatctgtacaagcaaatctccagccagtctggagccagcaacgacaaccactactttggctacagcaccccctgggggtattttgacttcaacagattccactgccacttctccccacgtgactggcaaagactcatcaacaacaactggggattccggcccaagagactcagcttcaagctctttaacattcaagtcaaagaggtcacgcagaatgacggtacgacgacgattgccaataaccttaccagcacggttcaggtgtttactgactcggagtaccagctcccgtacgtcctcggctcggcgcatcaaggatgcctcccgccgttcccagcagacgtcttcatggtgccacagtatggatacctcaccctgaacaacggcagtcaggcggtaggacgctcttccttttactgcctggagtactttccttctcagatgcttcgtaccggaaacaactttaccttcagctacacctttgaagacgttcctttccatagcagctacgctcacagccaaagtctggaccgtctcatgaatcctctcatcgaccagtacctgtattacttgagcagaacaaacactccaagcggaaccaccacgatgtccaggcttcagttttctcaggccggagcaagtgacattcgggaccagtctagaaactggcttcctggaccctgttaccgccagcagcgagtatcaaagacagctgcggacaacaacaacagtgattactcgtggactggagctaccaagtaccacctcaatggaagagactctctggtgaatccgggcccagctatggccagccacaaggacgatgaagaaaaatattttcctcagagcggggttctcatctttggaaaacaagactcgggaaaaactaatgtggacattgaaaaggttatgattacagacgaagaggaaatcaggaccaccaatcccgtggctacggagcagtatggttctgtatctaccaacctccagagcggcaacacacaagcagctacctcagatgtcaacacacaaggcgttcttccaggcatggtctggcaggacagagacgtgtacctgcaggggcccatctgggcaaagattccacacacggacggacattttcacccctctcccctcatgggcggattcggacttaaacaccctcctccacaaattctcatcaagaacaccccggtacctgcgaatccttcgaccactttcagtgcggcaaagtttgcttccttcatcacacagtactccacggggcaggtcagcgtggagatcgagtgggagctgcagaaggagaacagcaaacgctggaatcccgaaattcagtacacttccaactacaacaaatctgttaatgtggactttactgtggacactaatggtgtgtattcagagcctcgccccattggcaccagatacctgactcgtaatctgtaa

SEQ ID NO: 115 - DNA, 2208 bp, Adeno-associated virus
atggctgccgatggttatcttccagattggctcgaggacactctctctgaaggaataagacagtggtggaagctcaaacctggcccaccaccaccaaagcccgcagagcggcataaggacgacagcaggggtcttgtgcttcctgggtacaagtacctcggacccttcaacggactcgacaagggagagccggtcaacgaggcagacgccgcggccctcgagcacgacaaggcctacgaccggcagctcgacagcggagacaacccgtacctcaagtacaaccacgccgacgcggagtttcaggagcgccttaaaggagatacgtcttttgggggcaacctcggacgagcagtcttccaggccaaaaagaggattcttgaacctctgggcctggttgaggaacctgttaagacggctccgggaaaaaagaggccggtagagcactctcctgcggagccagactcctcctcgggaaccggaaaagcgggccagcagcctgcaagaaagagattgaattttggtcagactggagacgcagactcagtacctgacccccagcctctcggacagccaccagcagccccctctggtctgggaactaatacgatggcttcaggcagtggcgcaccaatggcagacaataacgagggcgccgacggagtgggtaattcctcgggaaattggcattgcgattccacatggatgggcggcagagtcatcaccaccagcacccgcacctgggccctgcccacctacaacaaccatctgtacaagcaaatctccagccagtctggagccagcaacgacaaccactactttggctacagcaccccctgggggtattttgacttcaacagattccactgccacttctccccacgtgactggcaaagactcatcaacaacaactggggattccggcccaagagactcagcttcaagctctttaacattcaagtcaaagaggtcacgcagaatgacggtacgacgacgattgccaataaccttaccagcacggttcaggtgtttactgactcggagtaccagctcccgtacgtcctcggctcggcgcatcaaggatgcctcccgccgttcccagcagacgtcttcatggtgccacagtatggatacctcaccctgaacaacggcagtcaggcggtaggacgctcttccttttactgcctggagtactttccttctcagacgcttcgtaccggaaacaactttaccttcagctacacctttgaagacgttcctttccatagcagctacgctcacagccaaagtctggaccgtctcatgaatcctctcatcgaccagtacctgtattacttgagcagaacaaacactccaagcggaaccaccacgatgtccaggcttcagttttctcaggccggagcaagtgacattcgggaccagtctagaaactggcttcctggaccctgttaccgccagcagcgagtatcaaagacagctgcggacaacaacaacagtgattactcgtggactggagctaccaagtaccacctcaatggaagagactctctggtgaatccgggcccagctatggccagccacaaggacgatgaagaaaaatattttcctcagagcggggttctcatctttggaaaacaagactcgggaaaaactaatgtggacattgaaaaggttatgattacagacgaagaggaaatcaggaccaccaatcccgtggctacggagcagtatggttctgtatctaccaacctccagagcggcaacacacaagcagctacctcagatgtcaacacacaaggcgttcttccaggcatggtctggcaggacagagacgtgtacctgcaggggcccatctgggcaaagattccacacacggacggacattttcacccctctcccctcatgggcggattcggacttaaacaccctcctccacaaattctcatcaagaacaccccggtacctgcgaatccttcgaccactttcagtgcggcaaagtttgcttccttcatcacacagtactccacggggcaggtcagcgtggagatcgagtgggagctgcagaaggagaacagcaaacgctggaatcccgaaattcagtacacttccaactacaacaaatctgttaatgtggactttactgtggacactaatggtgtgtattcagagcctcgccccattggcaccagatacctgactcgtaatctgtaa

SEQ ID NO: 116 - DNA, 2208 bp, Adeno-associated virus
atggctgccgatggttatcttccagattggctcgaggacactctctctgaaggaataagacagtggtggaagctcaaacctggcccaccaccaccaaagcccgcagagcggcataaggacgacagcaggggtcttgtgcttcctgggtacaagtacctcggacccttcaacggactcgacaagggagagccggtcaacgaggcagacgccgcggccctcgagcacgacaaggcctacgaccggcagctcgacagcggagacaacccgtacctcaagtacaaccacgccgacgcggagtttcaggagcgtcttaaagaagatacgtcttttgggggcaacctcggacgagcagtcttccaggccaaaaagaggattcttgaacctctgggcctggttgaggaacctgttaagacggctccgggaaaaaagaggccggtagagcactctcctgcggagccagactcctcctcgggaaccggaaaagcgggccagcagcctgcaagaaagagattgaattttggtcagactggagacgcagactcagtacctgacccccagcctctcggacagccaccagcagccccctctggtctgggaactaatacgatggcttcaggcagtggcgcaccaatggcagacaataacgagggcgccgacggagtgggtaattcctcgggaaattggcattgcgattccacatggatgggcgacagagtcatcaccaccagcacccgcacctgggccctgcccacctgcaacaaccatctgtacaagcaaatctccagccagtctggagccagcaacgacaaccactactttggctacagcaccccctgggggtattttgacttcaacagattccactgccacttctccccacgtgactggcaaagactcatcaacaacaactggggattccggcccaagagactcagcttcaagctctttaacattcaagtcaaagaggtcacgcagaatgacggtacgacgacgattgccaataaccttaccagcacggttcaggtgtttactgactcggagtaccagctcccgtacgtcctcggctcggcgcatcaaggatgcctcccgccgttcccagcagacgtcttcatggtgccacagtatggatacctcaccctgaacaacggcagtcaggcggtaggacgctcttccttttactgcctggagtattttccttctcagatgcttcgtaccggaaacaactttaccttcagctacacctttgaagacgttcctttccatagcagctacgctcacagccaaagtctggaccgtctcatgaatcctctcatcgaccagtacctgtattacttgagcagaacaaacactccaagcggaaccaccacgatgtccaggcttcagttttctcaggccggagcaagtgacattcgggaccagtctagaaactggcttcctggaccctgttaccgccagcagcgagtatcaaagacagctgcggacaacaacaacagtgattactcgtggactggagctaccaagtaccacctcaatggaagagactctctggtgaatccgggcccagctatggccagccacaaggacgatgaagaaaaatattttcctcagagcggggttctcatctttggaaaacaagactcgggaaaaactaatgtggacattgaaaaggttatgattacagacgaagaggaaatcaggaccaccaatcccgtggctacggagcagtatggttctgtatctacctacctccagagcggcaacacacaagcagctacctcagatgtcaacacacaaggcgttcttccaggcatggtctggcaggacagagacgtgtacctgcgggggcccatctgggcaaagattccacacacggacggacattttcacccctctcccctcatgggcggatttggacttaaacaccctcctccacaaattctcatcaagaacaccccggtacctgcgaatccttcgaccactttcagtgcggcaaagtttgcttccttcatcacacagtactccacggggcaggtcagcgtggagatcgagtgggagctgcagaaggagaacagcaaacgctggaatcccgaaattcagtacacttccaactacaacaaatctgttaatgtggactttactgtggacactaatggtgtgtattcagagcctcgccccattggcaccagatacctgactcgtaatctgtaa

SEQ ID NO: 117 - DNA, 2208 bp, Adeno-associated virus
atggctgccgatggttatcttccagattggctcgaggacactctctctgaaggaataagacagtggtggaagctcaaacctggcccaccaccaccaaagcccgcagagcggcataaggacggcagcaggggtcttgtgcttcctgggtacaagtacctcggacccttcaacggactcgacaagggagagccggtcaacgaggcagacgccgcggccctcgagcacgacaaggcctacgaccggcagctcaacagcggagacaacccgtacctcaagtacaaccacgccgacgcggagtttcaggagcgccttaaagaagatacgtcttttgggggcaacctcggacgagcagtcttccaggcaaaaaagagggttcttgaacctctgggcctggttgaggagcctgttaaaacggctccgggaaaaaagagaccggtagagcactctcctgcggagccagactcctcctcgggaaccggaaaagcgggccagcagcctgcaagaaagagattgaattttggtcagactggagacgcagactccgtacctgacccccagcctctcggacagccaccagcagccccctctggtctgggatctactacaatggctacaggcagtggcgcaccaatggcagacaataacgagggtgccgatggagtgggtaattcctcaggaaattggcattgcgattcccaatggctgggcgacagagtcatcaccacaagcactcgaacctgggccctgcccacctacaacaaccacctctacaagcaaatctccagccaatcaggagcctcaaacgacaaccactattttggctacagcaccccttgggggtattttgacttcaacagattccactgccacttttcaccacgtgactggcaaagactcatcaacaacaactggggattccgacccaagagactcaacttcaagctctttaacattcaagtcaaagaggtcacgcagaatgacggtacgacgacgattgccaataaccttaccagcacggttcaggtgtttactgactcggagtaccagctcccgtacgtcctcggctcggcgcatcaaggatgcctcccgccgttcccagcggacgtcttcatggtcccacagtatggatacctcaccctgaacaacgggagtcaggcggtaggacgctctcccttttactgcctggagtactttccttctcagatgctgcgtactggaaacaactttcagttcagctacacttttgaagacgtgcctttccacagcagctacgctcacagccagagtctggatcggctgatgaatcctctgatcgaccagtacctgtattatctgaacaagacacaaacaaatagtggaactcttcagcagtctcggctactgtttagccaagctggacccaccaacatgtctcttcaagctaaaaactggctgcctggaccttgctacagacagcagcgtctgtcaaagcaggcaaacgacaacaacaacagcaactttccctggactgcagctacaaagtatcatctaaatggccgggactcgttggttaatccaggaccagctatggccagtcacaaggatgacgaagaaaagtttttccccatgcatggaaccctgatatttggtaaacaaggaacaaatgccaacgacgcggatttggaaaatgtcatgattacagatgaagaagaaatcaggaccaccaatcccgtggctacggagcagtacgggactgtgtcaaataatttgcaaaactcaaacactggtccaactactggaactgtcaatcaccaaggagcgttacctggtatggtgtggcaggatcgagatgtgtaccttcagggacccatttgggccaagattcctcacaccgatggacactttcatccttctccactgatgggaggttttggactcaaacacccgcctcctcagattatgatcaaaaacactcccgttccagccaatcctcctacaaacttcagttctgccaagtttgcttctttcatcacacagtattccacggggcaggtcagcgtggagatcgagtgggagctgcagaaggagaacagcaaacgctggaatcccgaaattcagtacacttccaactacaacaaatctgttaatgtggactttactgtggacaataatggcgtgtactcagagcctcgccccattggcaccagatacctgactcgtaatctgtaa

SEQ ID NO: 118 - DNA, 2208 bp, Adeno-associated virus
atggctgccgatggttatcttccagattggctcgaggacactctctctgaaggaataagacagtggtggaagctcaaacctggcccaccaccaccaaagcccgcagagcggcataaggacgacagcaggggtcttgtgcttcctgggtacaagtacctcggacccttcaacggactcgacaagggagagccggtcaacgaggcagacgccgcggccctcgagcacgacaaggcctacgaccggcagctcgacagcggagacaacccgtacctcaagtacaaccacgccgacgcggagtttcaggagcgtcttaaagaagatacgtcttttgggggcaacctcggacgagcagtcttccaggccaaaaagaggattcttgaacctctgggcctggttgaggaacctgttaagacggctccgggaaaaaagaggccggtagagcactctcctgcggagccagactcctcctcgggaaccggaaaagcgggccagcagcctgcaagaaagagattgaattttggtcagactggagacgcagactcagtacctgacccccagcctctcggacagccaccagcagccccctctggtctgggaactaatacgatggcttcaggcagtggcgcaccaatggcagacaataacgagggcgccgacggagtgggtaattcctcgggaaattggcattgcgattccacatggatgggcgacagagtcatcaccaccagcacccgcacctgggccctgcccacctacaacaaccatctgtacaagcaaatctccagccagtctggagccagcaacgacaaccactactttggctacagcaccccctgggggtatttcgacttcaacagattccactgccacttctccccacgtgactggcaaagactcatcaacaacaactggggattccggcccaagagactcagcttcaagctctttaacattcaagtcaaagaggtcacgcagaatgacggtacgacgacgattgccaataaccttaccagcacggttcaggtgtttactgactcggggtaccagctcccgtacgtcctcggctcggcgcatcaaggatgccttccgccgttcccagcagacgtcttcatggtgccacagtatggatacctcaccctgaacaacggcagtcaggcggtaggacgctcttccttttactgcctggagtactttccttctcagatgcttcgtaccggaaacaactttaccttcagctacacctttgaagacgttcctttccatagcagctacgctcacggccaaagtctggaccgtctcatgaatcctctcatcgaccagtacctgtattacttgagcagaacaaacactccaagcggaaccaccacgatgtccaggcttcagttttctcaggccggagcaagtgacgttcgggaccagtctagaaactggcttcctggaccctgttaccgccagcagcgagtatcaaagacagctgcggacaacaacaacagtgattactcgtggactggagctaccaagtaccacctcaatggaagagactctctggtgaatccgggcccagctatggccagccacaaggacgatgaagaaaaatattttcctcagagcggggttctcgtctttggaaaacaagactcgggaaaaactaatgtggacattgaaaaggttatgattacagacgaagaggaaatcaggaccaccaatcccgcggctacggagcagtatggttctgtatctaccaacctccagagcggcaacacacaagcagctacctcagatgtcaacacacaaggcgttcttccaggcatggtctggcaggacagagacgtgtacctgcaggggcccatctgggcaaagattccacacacggacggacattttcacccctctcccctcatgggcggattcggacttaaacaccctcctccacaaattctcatcaagaacaccccggtacctgcgaatccttcgaccactttcagtgcggcaaagtttgtttccttcatcacacagtactccacggggcaggtcagcgtggagatcgagtgggagctgcagaaggagaacagcaaacgctggaatcccgaaattcagtacacttccaactacaacaaatctgttaatgtggactttactgtggacactaatggtgtgtattcagagcctcgccccattggcaccagatacctgactcgtaatctgtaa

SEQ ID NO: 119 - DNA, 2208 bp, Adeno-associated virus
atggctgccgatggttatcttccagattggctcgaggacactctctctgaaggaataagacagtggtggaaactcaaacctggcccaccaccaccaaagcccgcagagcggcataaggacgacagcaggggtcttgtgcttcctgggtacaagtacctcggacccttcaacggactcgacaagggagagccggtcaacgaggcagacgccgcggccctcgagcacgacaaggcctacgaccggcagctcgacagcggagacaacccgtacctcaagtacaaccacgccgacgcggagtttcaggagcgccttaaagaagatacgtcttttgggggcaacctcggacgagcagtcttccaggcaaaaaagagggttctggaacctctgagcctggttgaggagcctgttaagacggctccgggaaaaaagaggccggtagagcactctcccgcagagccagattcctcctccggaactggaaagtcgggcaaccagcctgcaagaaagagattgaatttcggtcagactggagactcagactccgtacctgacccccagcctctcggacagccaccagcagccccctctggtctgggaactaatacgatggctacaggcagtggcgcaccaatggcagacaataacgagggcgccgacggagtgggtaattcctcgggaaattggcattgcgattccacatggatgggcgacagagtcatcaccaccagcacccgaacctgggccctgcccacctacaacaaccatctgtacaagcaaatatccagccagtctggagccagcaacgacaatcactactttggctacagcaccccctgggggtattttgacttcaacagattccactgccacttttcaccacgtgactggcaaagactcatcaacaacaactggggattccgacccaagagactcaacttcaagctctttaacattcaagtcaaagaggtcacgcagaatgacggtacgacgacgattgccaataaccttaccagcacggttcaggtgtttactgactcggagtaccagctcccgtacgtcctcggctcggcgcatcaaggatgcctcccgccgttcccagcagacgtcttcatggtgccacagtatggatacctcaccctgaacaacgggagtcaggcagtaggacgctcttcattttactgcctagagtactttccttctcagatgctgcgtaccggaaacaactttaccttcagctacacctttgaggacgttcctttccacagcagctacgctcacagccagagtttggaccgtctcatgaatcctctcatcgaccagtacctgtattacttgagcagaacaaacactccaagcggaaccaccacgcagtccaggcttcagttttctcaggccggagcgagtgacattcaggaccagtctaggaactggcttcctggaccctgttaccgtcagcagcgagtatcaaagacatctgcggataacaacaacagtgaatactcgtggactggagctaccaagtaccacctcaatggcagagactctctggtgaatccgggcccggccatggccagccacaaagacgatgaagaaaagttttttcctcagagcggggttcttatctttgggaagcaaggctcagagaaaacaaatgtggatattgaaaaggtcatgattacagacgaagaggaaatcaggaccaccaatcccgtggctacggagcagtatggttctgtatctaccaacctccagagcggcaacacacaagcagctaccgcagatgtcaacacacaaggcgttcttccaggcatggtcgggcaagacagagacgtgtacctgcaggggcctacttgggcaaagattccacacacggacggacattttcacccctctcccctcatgggcggatttggacttaaacaccctcctccacagattctcatcaagaacaccccggtacctgcgaatccttcgaccaccttcagtgcggcaaagtttgcttccttcattacacagtactccacggggcaggtcagcgtggagatcgagtgggagctgcagaaggagaacagcaaacgctggaatcccgagatccagtacacttccaactacaacaagtctgttaatgtggactttactgtggacactaatggcgtgtattcagagcctcgccccattggcaccagatacctgactcgtaatctgtaa

SEQ ID NO: 120 - DNA, 2208 bp, Adeno-associated virus
atggctgccgatggttatcttccagattggctcgaggacactctctctgaaggaataagacagtggtggaagctcaaacctggcccaccaccaccaaagcccgcagagcggcataaggacgacagcaggggtcttgtgcttcctgggtacaagtacctcggacccttcaacggactcgacaagggagagccggtcaacgaggcagacgccgcggccctcgagcacgacaaggcctacgaccggcagctcgacagcggagacaacccgtacctcaagtacaaccacgccgacgcagagtttcaggagcgccttaaagaagatacgtcttttgggggcaacctcggacgagcagtcttccaggcaaaaaagagggttctggaacctctgggcctggttgaggagcctgttaagacggctccgggaaaaaagaggccggtagagcactctcctgcagagccagattcctcctccggaactggaaagtcgggcaaccagcctgcaagaaagagattgaatttcggtcagactggagactcagactccgtacctgacccccagcctctcggacagccaccagcagccccctctggtctgggaactaatacgatggctacaggcagtggcgcaccaatggcagacaataacgagggcgccgacggagtgggtaattcctcgggaaattggcattgcgattccacatggatgggcgacagagtcatcaccaccagcacccgaacctgggccctgcccacctacaacaaccatctgtacaagcaaatatccagccagtctggagccagcaacgacaatcactactttggctacagcaccccctgggggtattttgacttcaacagattccactgccacttttcaccacgtgactggcaaagactcatcaacaacaactggggattccgacccaagagactcaacttcaagctctttaacattcaagtcaaagaggtcacgcagaatgacggtacgacgacgattgccaataaccttaccagcacggttcaggtgtttactgactcggagtaccagctcccgtacgtcctcggctcggcgcatcaaggatgcctcccgccgttcccagcagacgtcttcatggtgccacagtatggatacctcaccctgaacaacgggagtcaggcagtaggacgctcttcattttactgcctagggtactttccttctcagatgctgcgtaccggaaacaactttaccttcagctacacctttgaggacgttcctttccacagcagctacgctcacagccagagtttggaccgtctcatgaatcctctcatcgaccagtacctgtattacttgagcagaacaaacactccaagcggaaccaccacgcagtccaggcttcagttttctcaggccggagcgagtgacattcgggaccagtctaggaactggcttcctggaccctgttaccgtcagcagcgagtatcaaagacatctgcggataacaacaacagtgaatactcgtggactggagctaccaagtaccacctcaatggcagagactctctggtgaatccgggcccggccatggccagccacaaagacgatgaagaaaagttttttcctcagagcggggttcttatctttgggaagcaaggcccagagaaaacaaatgtggatattgaaaaggtcatgattacagacgaagaggaaatcaggaccaccaatcccgtggctacggagcagtatggttctgtatctaccaacctccagagcggcaacacacaagcagctaccgcagatgtcaacacacaaggcgttcttccaggcatggtctggcaagacagagacgtgtacctgcaggggcctatttgggcaaagattccacacacggacggacattttcacccctctcccctcatgggcggatttggacttaaacaccctcctccacagattctcatcaagaacaccccggtacctgcgaatccttcgaccaccttcagtgcggcaaagtttgcttccttcattacacagtactccacggggcaggtcagcgtggagatcgagtgggagctgcagaaggagaacagcaaacgctggaatcccgagatccagtacacttccaactacaacaagtctgttaatgtggactttactgtggacactaatggcgtgtattcagagcctcgccccattggcaccagatacctgactcgtaatctgtaa

SEQ ID NO: 121 - DNA, 2211 bp, Adeno-associated virus
atggctgccgatggttatcttccagattggctcgaggacactctctctgaaggaataagacagtggtggaagctcaaacctggcccaccaccaccaaagcccgcagagcggcataaggacgacagcaggggtcttgtgcttcctgggtacaagtacctcggacccttcaacggactcgacaagggggagccggtcaacgaggcagacgccgcggccctcgagcacgacaaggcctacgaccggcagctcgacagcggagacaacccgtacctcaagtacaaccacgccgacgcagagtttcaggagcgccttaaagaagatacgtcttttgggggcaacctcggacgagcagtcttccaggcgaaaaagagggttcttgaacctctgcggcctggtttgaggaaacctgttaagacggctccgggaaaaaagaggccggtagagcactctcctgtggagccagactcctcctcgggaaccggaaaagcgggccagcagcctgcaagaaaaagattaaattttggtcagactggagacgcagactccgtacctgacccccagcctctcggacagccaccagcagccccctctggtctgggatctactacaatggctacaggcagtggcgcaccaatggcagacaataacgagggtgccgatggagtgggtaattcctcaggaaattggcattgcgattcccaatggctggacgacagagtcatcgccaccagcacccgaacctgggccctgcccacatacaacaaccacctctacaagcaaatctccagccaatcaggagcctgcaacgacaaccactactttggctacagcaccccctgggggtattttgacttcaacagattccactgccacttttcaccacgtgactggcaaagactcatcaacagcaactggggattccggcccaaaagactcaacttcaagctctttaatattcaagtcaaagaggtcacgcagaatgacggtacgacgacgattgccaataaccttaccagcacggttcaggtgtttactgactcggagtaccagctcccgtacgtcccgggctcggcgcatcaaggatgcctcccgccgtttccagcggacgtcttcatggtcccacagtatggatacctcaccctgaacaacgggagtcaggcggtaggacgctcttccttttactgcctggagtactttccttctcagatgctgcgtactggaaacaactttcagttcagctacacttttgaagacgtgcctttccacagcagctacgctcactgccagagtctggatcggctgatgaatcctctgatcgaccagtacctgtattatctgaacaagacacaaacaaatagtggaactcttcagcagtctcggctactgtttagccaagctggaccaaccaacatgtctcttcaagctaaaaactggctgcctggaccttgctacagacagcagcgtctgtcaaaacaggcaaacgacaataacaactgcaactttccctggactgcagctacaaagtatcatctaaatggccgggactcgttggttaatccaggaccagctatggccagtcacaaggatgacgaagaaaagtttttccccatgcatggaaccctgatatttggtaaacaaggaacaaatgccaacgacgcggatttggaaaatgtcatgattacagatgaagaagaaatcaggcccaccaatcccgtggctacggagcagtacgggactgtgtcaaataatttgcaaaactcaaacactggtccaactacaggaactgtcaatcaccaaggagcgttacctggtatggtgtggcaggatcgagacgtgtacctgcagggacccatttgggccaagattcctcacaccgatggacactttcatccttctccactgatgggaggttttggactcaaacacccgcctcctcagatcatgatcaaaagcactcccgttccagccaatcctcccacaaacttcagttctgccaagtttgcttcttccatcacacagtattccacgggacaggtcagcgtggagatcgagtgggagctgcagaaggagaacagcaaacgctggaatcccgaaattcagtacacttccaactacaacaagtctgttaatgtggactttactgtggacactaatggtgtgtattcagagcctcgccccattggcaccagatacctgactcgtaatctgtaa

SEQ ID NO: 122 - DNA, 2211 bp, Adeno-associated virus
atggctgccgatggttatcttccagattggctcgaggacactctctctgaaggaataagacagtggtggaagctcaaacctggccccccaccaccaaagcccgcagagcggcataaggacgacagcaggggtcttgtgcttcctgggtacaagtacctcggacccggcaacggactcgacaagggggagccggtcaacgcagcagacgcggcggccctcgagcacgacaaggcctacgaccagcagctcaaggccggagacaacccgtacctcaagtacaaccacgccgacgccgagttccaggagcggctcaaagaagatacgtcttttgggggcaacctcgggcgagcagtcttccaggccaaaaagaggcttcttgaacctcttggtctggttgaggaagcggctaagacggctcctggaaagaagaggcctgtagagcagtctcctcaggaaccggactcctccgcgggtattggcaaatcgggttcacagcccgctaaaaagaaactcaatttcggtcagactggcgacacagagtcagtccccgaccctcaaccaatcggagaacctcccgcagccccctcaggtgtgggatctcttacaatggcttcaggtggtggcgcaccagtggcagacaataacgaaggtgccgatggagtgggtagttcctcgggaaattggcattgcgattcccaatggctgggggacagagtcatcaccaccagcacccgaacctgggccctgcccacctacaacaatcacctctacaagcaaatctccaacagcacatctggaggatcttcaaatgacaacgcctacttcggctacagcaccccctgggggtattttgacttcaacagattccactgccacttctcaccacgtgactggcagcgactcatcaacaacaactggggattccggcctaagcgactcaacttcaagctcttcaacattcaggtcaaagaggttacggacaacaatggagtcaagaccatcgccaataaccttaccagcacggtccaggtcttcacggactcagactatcagctcccgtacgtgctcgggtcggctcacgagggctgcctcccgccgttcccagcggacgttttcatgattcctcagtacgggtatctgacgcttaatgatggaggccaggccgtgggtcgttcgtccttttactgcctggaatatttcccgtcgcaaatgctaagaacgggtaacaacttccagttcagctacgagtttgagaacgtacctttccatagcagctacgctcacagccaaagcctggaccgactaatgaatccactcatcgaccaatacttgtactatctctcaaagactattaacggttctggacagaatcaacaaacgctaaaattcagtgtggccggacccagcaacatggctgtccagggaagaaactacatacctggacccagctaccgacaacaacgtgtctcaaccactgtgactcaaaacaacaacagcgaatttgcttggcctggagcttcttcttgggctctcaatggacgtaatagcttgatgaatcctggacctgctatggccagccacaaagaaggagaggaccgtttctttcctttgtccggatctttaatttttggcaaacaaggaactggaagagacaacgtggatgcggacaaagtcatgataaccaacgaagaagaaattaaaactactaacccggtagcaacggagtcctatggacaagtggccacaaaccaccagagtgcccaagcacaggcgcagaccggctgggttcaaaaccaaggaatacttccgggtatggtttggcaggacagagatgtgtacctgcaaggacccatttgggccaaaattcctcacacggacggcaactttcacccttctccgctaatgggagggtttggaatgaagcacccgcctcctcagatcctcatcaaaaacacacctgtacctgcggatcctccaacggctttcaataaggacaagctgaactctttcatcacccagtattctactggccaagtcagcgtggagattgagtgggagctgcagaaggaaaacagcaagcgctggaacccggagatccagtacacttccaactattacaagtctaataatgttgaatttgctgttagtactgaaggtgtatatagtgaaccccgccccattggcaccagatacctgactcgtaatctgtaa

SEQ ID NO: 123 - DNA, 2211 bp, Adeno-associated virus
atggctgccgatggttatcttccagattggctcgaggacactctctctgaaggaataagacagtggtggaagctcaaacctggcccaccaccaccaaagcccgcagagcggcataaggacgacagcaggggtcttgtgcttcctgggtacaagtacctcggacccggcaacggactcgacaagggggagccggtcaacgcagcagacgcggcggccctcgagcacgacaaggcctacgaccagcagctcaaggccggagacaacccgtacctcaagtacaaccacgccgacgccgagttccaggagcggctcaaagaagatacgtcttttgggggcaacctcgggcgagcagtcttccaggccaaaaagaggcttcttgaacctcttggtctggttgaggaagcggctaagacggctcctggaaagaagaggcctgtagagcagtctcctcaggaaccggactcctccgcgggtattggcaaatcgggttcacagcccgctaaaaagaaactcaatttcggtcagactggcgacacagagtcagtccccgaccctcaaccaatcggagaacctcccgcagccccctcaggtgtgggatctcttacaatggcttcaggtggtggcgcaccagtggcagacaataacgaaggtgccgatggagtgggtagttcctcgggaaattggcattgcgattcccaatggctgggggacagagtcatcaccaccagcacccgaacctgggccctgcccacctacaacaatcacctctacaagcaaatctccaacagcacatctggaggatcttcaaatgacaacgcctacttcggctacagcaccccctgggggtattttgacttcaacagattccactgccacttctcaccacgtgactggcagcgactcatcaacaacaactggggattccggcctaagcgactcaacttcaagctcttcaacattcaggtcaaagaggttacggacaacaatggagtcaagaccatcgccaataaccttaccagcacggtccaggtcttcacggactcagactatcagctcccgtacgtgctcgggtcggctcacgagggctgcctcccgccgttcccagcggacgttttcatgattcctcagtacgggtatctgacgcttaatgatgggagccaggccgtgggtcgttcgtccttttactgcctggaatatttcccgtcgcaaatgctaagaacgggtaacaacttccagttcagctacgagtttgagaacgtacctttccatagcagctacgctcacagccaaagcctggaccgactaatgaatccactcatcgaccaatacttgtactatctctcaaagactattaacggttctggacagaatcaacaaacgctaaaattcagcgtggccggacccagcaacatggctgtccagggaagaaactacatacctggacccagctaccgacaacaacgtgtctcaaccactgtgactcaaaacaacaacagcgaatttgcttggcctggagcttcttcttgggctctcaatggacgtaatagcttgatgaatcctggacctgctatggccagccacaaagaaggagaggaccgtttctttcctttgtctggatctttaatttttggcaaacaaggaactggaagagacaacgtggatgcggacaaagtcatgataaccaacgaagaagaaattaaaactactaacccggtagcaacggagtcctatggacaagtggccacaaaccaccagagtgcccaagcacaggcgcagaccggctgggttcaaaaccaaggaatacttccgggtatggtttggcaggacagagatgtgtacctgcaaggacccatttgggccaaaattcctcacacggacggcaactttcacccttctccgctaatgggagggtttggaatgaagcacccgcctcctcagatcctcatcaaaaacacacctgtacctgcggatcctccaacggctttcaataaggacaagctgaactctttcatcacccagtattctactggccaagtcagcgtggagattgagtgggagctgcagaaggaaaacagcaagcgctggaacccggagatccagtacacttccaactattacaagtctaataatgttgaatttgctgttaatactgaaggtgtatatagtgaaccccgccccattggcaccagatacctgactcgtaatctgtaa

SEQ ID NO: 124 - DNA, 2208 bp, Adeno-associated virus
atggctgccgatggttatcttccagattggctcgaggacactctctctgaaggaataagacagcggtggaagctcaaacctggcccaccaccaccagagcccgcagagcggcataaggacgacagcaggggtcttgtgcttcctgggtacaagtacctcggacccttcaacggactcgacaagggagagccggtcaacgaggcagacgccgcggccctcgagcacgacaaagcctacgaccggcagctcgacagcggagacaacccgtacctcaagtacaaccacgccgacgcggagtttcaggagcgccttaaagaagatacgtcctttgggggcaacctcggacgagcagtcttccaggcgaaaaagagggtacttgaacctctgggcctggttgaggaacctgttaagacggctccgggaaaaaagaggccggtagagcactctcctgtggagccagactcctcctcgggaaccggaaaggcgggccagcagcctgcaagaaaaagattgaattttggtcagactggagacgcagactcagtacctgacccccagcctctcggacagccaccagcagccccctctggtctgggaactaatacgatggctacaggcagtggcgcaccaatggcagacaataacgagggcgccgacggagtgggtaattcctcgggaaattggcattgcgattccacatggatgggcgacagagtcatcaccaccagcacccgaacctgggccctgcccacctacaacaaccacctctacaaacaaatttccagccaatcaggagcctcgaacgacaatcactactttggctacagcaccccttgggggtattttgacttcaacagattccactgccacttttcaccacgtgactggcaaagactcatcaacaacaactggggattccgacccaagagactcaacttcaagctctttaacattcaagtcaaagaggtcacgcagaatgacggtacgacgacgattgccaataaccttaccagcacggttcaggtgtttactgactcggagtaccagctcccgtacgtcctcggctcggcgcatcaaggatgcctcccgccgttcccagcagacgtcttcatggtgccacagtatggatacctcaccctgaacaacgagagtcaggcagtaggacgctcttcattttactgcctggagtactttccttctcagatgctgcgtaccggaaacaactttaccttcagctacacttttgaggacgttcctttccacagcagctacgctcacagccagagtctgggccgtctcatgaatcctctcatcgaccagtacctgtattacttgagcagaacaaacactccaagtggaaccaccacgcagtcaaggcttcagttttctcaggccggagcgagtgacattcgggaccagtctaggaactggcttcctggaccctgttaccgccagcagcgagtatcaaagacatctgcggataacaacaacagtgaatactcgtggactggagctaccaagtaccacctcaatggcagagactctctggtgaatccgggcccggccatggcaagccacaaggacgatgaagaaaagttttttcctcagagcggggttctcatctttgggaagcaaggctcagagaaaacaaatgtggacattgaaaaggtcatgattacagacgaagaggaaatcaggacaaccaatcccgtggctacggagcagtatggttctgtatctaccaacctccagagaggcaacagacaagcagctaccgcagatgtcaacacacaaggcgttcttccaggcatggtctggcaggacagagatgtgtaccttcaggggcccatctgggcaaagattccacacacggacggacattttcacccctctcccctcatgggtggattcggacttaaacaccctcctccacagattctcatcaagaacaccccggtacctgcgaatccttcgaccaccttcagtgcggcaaagtttgcttccttcatcacacagtactccacgggacaggtcagcgtggagatcgagtgggagctgcagaaggaaaacagcaaacgctggaatcccgaaattcagtacacttccaactacaacaagtctgttaatgtggactttactgtggacactaatggcgtgtattcagagcctcgccccattggcaccagatacctgactcgtaatctgtaa

SEQ ID NO: 125 - DNA, 2208 bp, Adeno-associated virus
atggctgccgatggttatcttccagattggctcgaggacactctctctgaaggaataagacagcggtggaagctcaaacctggcccaccaccaccagagcccgcagagcggcataaggacgacagcaggggtcttgtgcttcctgggtacaagtacctcggacccttcaacggactcgacaagggagagccggtcaacgaggcagacgccgcggccctcgagcacgacaaagcctacgaccggcagctcgacagcggagacaacccgtacctcaagtacaaccacgccgacgcggagtttcaggagcgccttaaagaagatacgtcttttgggggcaacctcggacgagcagtcttccaggcgaaaaagagggtacttgaacctctgggcctggttgaggaacctgttaagacggctccgggaaaaaagaggccggtagagcactctcctgtggagccagactcctcctcgggaaccggaaaggcgggccagcagcctgcaagaaaaagattgaattttggtcagactggagacgcagactcagtacctgacccccagcctctcggacagccaccagcagccccctctggtctgggaactaatacgatggctacaggcagtggcgcaccaatggcagacaataacgagggcgccgacggagtgggtaattcctcgggaaattggcattgcgattccacatggatgggcgacagagtcatcaccaccagcacccgaacctgggccctgcccacctacaacaaccacctctacaaacaaatttccagccaatcaggagcctcgaacgacaatcactactttggctacagcaccccttgggggtattttgacttcaacagattccactgccacttttcaccacgtgactggcaaagactcatcaacaacaactggggattccgacccaagagactcaacttcaagctctttaacattcaagtcaaagaggtcacgcagaatgacggtacgacgacgattgccaataaccttaccagcacggttcaggtgtttactgactcggagtaccagctcccgtacgtcctcggctcggcgcatcaaggatgcctcccgccgttcccagcagacgtcttcatggtaccacagtatggatacctcaccctgaacaacgggagtcaggcagtaggacgctcttcattttactgcctggagtactttccttctcagatgctgcgtaccggaaacaactttaccttcagctacacttttgaggacgttcctttccacagcagctacgctcacagccagagtctgggccgtctcatgaatcctctcatcgaccagtacctgtattacttgagcagaacaaacactccaagtggaaccaccacgcagtcaaggcttcagttttctcaggccggagcgagtgacattcgggaccagtctaggaactggcttcctggaccctgttaccgccagcagcgagtatcaaagacatctgcggataacaacaacagtgaatactcgtggactggagctaccaagtaccacctcaatggcagagactctctggtgaatccgggcccggccatggcaagccacaaggacgatgaagaaaagttttttcctcagagcggggttctcatctttgggaagcaaggctcagagaaaacaaatgtggacattgaaaaggtcatgattacagacgaagaggaaatcaggacaaccaatcccgtggctacggagcagtatggttctgtatctaccaacctccagagaggcaacagacaagcagctaccgcagatgtcaacacacaaggcgttcttccaggcatggtctggcaggacagagatgtgtaccttcaggggcccatctgggcaaagattccacacacggacggacattttcacccctctcccctcatgggtggattcggacttaaacaccctcctccacagattctcatcaagaacaccccggtacctgcgaatccttcgaccaccttcagtgcggcaaagtttgcttccttcatcacacagtactccacgggacaggtcagcgtggagatcgagtgggagctgcagaaggaaaacagcaaacgctggaatcccgaaattcagtacacttccaactacaacaagtctgttaatgtggactttactgtggacactaatggcgtgtattcagagcctcgccccattggcaccagatacctgactcgtaatctgtaa

SEQ ID NO: 126 - DNA, 2217 bp, Adeno-associated virus
atggctgctgacggttatcttccagattggctcgaggacaacctctctgagggcattcgcgagtggtgggacctgaaacctggagcccccaagcccaaggccaaccagcagaagcaggacgacggccggggtctggtgcttcctggctacaagtacctcggacccttcaacggactcgacaagggggagcccgtcaacgcggcggacgcagcggccctcgagcacgacaaggcctacgaccagcagctcaaagcgggtgacaatccgtacctgcggtataaccacgccgacgccgagtttcaggagcgtctgcaagaagatacgtcttttgggggcaacctcgggcgagcagtcttccaggccaagaagcgggttctcgaacctctcggtctggttgaggaagctgctaagacggctcctggaaagaagagaccggtagaaccgtcacctcagcgttcccccgactcctccacgggcatcggcaagaaaggccagcagcccgctaaaaagagactgaactttggtcagactggcgactcagagtcagtccccgaccctcaaccaatcggagaaccaccagcaggcccctctggtctgggatctggtacaatggctgcaggcggtggcgctccaatggcagacaataacgaaggcgccgacggagtgggtagttcctcaggaaattggcattgcgattccacatggctgggcgacagagtcatcaccaccagcacccgaacctgggccctgcccacctacaacaaccacctctacaagcaaatatccaatgggacatcgggaggaagcaccaacgacaacacctacttcggctacagcaccccctgggggtattttgacttcaacagattccactgccacttctcaccacgtgactggcagcgactcatcaacaacaactggggattccggccaaaaagactcagcttcaagctcttcaacatccaggtcaaggaggtcacgcagaatgaaggcaccaagaccatcgccaataaccttaccagcacgattcaggtatttacggactcggaataccagctgccgtacgtcctcggctccgcgcaccagggctgcctgcctccgttcccggcggacgtcttcatgattccccagtacggctaccttacactgaacaatggaagtcaagccgtaggccgttcctccttctactgcctggaatattttccatctcaaatgctgcgaactggaaacaattttgaattcagctacaccttcgaggacgtgcctttccacagcagctacgcacacagccagagcttggaccgactgatgaatcctctcatcgaccagtacctgtactacttatccagaactcagtccacaggaggaactcaaggtacccagcaattgttattttctcaagctgggcctgcaaacatgtcggctcaggctaagaactggctacctggaccttgctaccggcagcagcgagtctctacgacactgtcgcaaaacaacaacagcaactttgcttggactggtgccaccaaatatcacctgaacggaagagactctttggtaaatcccggtgtcgccatggcaacccacaaggacgacgaggaacgcttcttcccgtcgagtggagtcctgatgttcggaaaacagggtgctggaagagacaatgtggactacagcagcgttatgctaaccagcgaagaagaaattaaaaccactaaccccgtagccacagaacaatacggtgtggtggctgacaacttgcagcaaaccaatacagggcctattgtgggaaatgtcaacagccaaggagccttacctggcatggtctggcagaaccgagacgtgtacctgcagggtcccatctgggccaagattcctcacacggacggcaacttccacccttcaccgctaatgggaggatttggactgaagcacccacctcctcagatcctgatcaagaacacgccggtacctgcggatcctccaacaacgttcagccaggcgaaattggcttccttcattacgcagtacagcaccggacaggtcagcgtggaaatcgagtgggagctgcagaaggagaacagcaaacgctggaacccagagattcagtacacttcaaactactacaaatctacaaatgtggactttgctgtcaatacagagggaacttattctgagcctcgccccattggtactcgttacctcacccgtaatctgtaa

SEQ ID NO: 127 - DNA, 2217 bp, Adeno-associated virus
atggctgccgatggttatcttccagattggctcgaggacaacctctctgagggcattcgcgagtggtgggacctgaaacctggagccccgaaacccaaagccaaccagcaaaagcaggacgacggccggggtctggtgcttcctggctacaagtacctcggacccttcaacggactcgacaagggggagcccgtcaacgcggcggacgcagcggccctcgagcacgacaaggcctacgaccagcagctcaaagcgggtgacaatccgtacctgcggtataatcacgccgacgccgagtttcaggagcgtctgcaagaagatacgtcttttgggggcaacctcgggcgagcagtcttccaggccaagaagcgggttctcgaacctctcggtctggttgaggaaggcgctaagacggctcctggaaagaagagaccggtagagccgtcaccacagcgttcccccgactcctccacgggcatcggcaagaaaggccagcagcccgccagaaagagactcaatttcggtcggactggcgactcagagtcagtccccgaccctcaacctatcggagaacctccagcagcgccctctagtgtgggatctggtacaatggctgcaggcggtggcgcaccaatggcagacaataacgaaggtgccgacggagtgggtagttcctcgggaaattggcattgcgattccacatggctgggcgacagagttatcaccaccagcacccgaacctgggccctgcccacctacaacaaccacctctacaagcaaatctccaacgggacctcgggaggcagcaccaacgacaacacctactttggctacagcaccccctgggggtatcttgactttaacagattccactgccacttctcaccacgtgactggcagcgactcatcaacaacaactggggattccggcccaagagactcagcttcaagctcttcaacatccaggtcaaagaggtcacgcagaatgaaggcaccaagaccatcgccaataacctcgccagcaccatccaggtgtttacggactcggaataccagccgccgtacgtcctcggctctgcccaccagggctgcctgcctccgttcccggcggacgtcttcatgattcctcagtacggctacctgactctcaacaacggtagtcaggccgtgggacgttcctccttctactgcctggagtacttcccctctcagatgctgagaacgggcaacaacttttccttcagctacactttcgaggacgtgcctttccacagcagctacgcgcacagccagagtttggacaggctgatgaatcctctcatcgaccagtacctgtactacctgtcaagaacccagtctacgggaggcacagcgggaacccagcagttgctgttttctcgggccgggcctagcaacatgtcggctcaggccagaaactggctgcctggaccctgctacagacagcagcgcgtctccacgacactgtcgcaaaacaacaacagcaactttgcctggactggtgccaccaagtatcatctgaacggcagagactctctggtgaatccgggcgtcgccatggcaaccaacaaggacgacgaggaccgcttcttcccatccagcggcatcctcatgtttggcaagcagggagctggaaaagacaacgtggactatagcaacgtgatgctaaccagcgaggaagaaatcaagaccaccaaccccgtggccacagaacagtatggcgtggtggctgataacctacagcagcaaaacaccgctcctactgtgggggccgtcaacagccagggagccttacctggcatggtctggcagaaccgggacgtgtacctgcagggtcctatttgggccaagattcctcacacagatggcaactttcacccgtctcctttaatgggcggctttggacttaaacatccgcctcctcagatcctcatcaaaaacactcctgttcctgcggatcctccaacagcgttcaaccaggccaagctgaattctttcatcgcgcagtacagcaccggacaagtcagcgtggagatcgagtgggagctgcagaaggagaacagcaagcgctggaacccagagattcagtatacttccaactactacaaatctacaaatgcggactttgctgttaatactgagggtgtttactctgagcctcgccccattggcactcgttacctcacccgtaatctgtaa

SEQ ID NO: 128 - DNA, 2208 bp, Adeno-associated virus
atggctgccgatggttatcttccagattggctcgaggacactctctctgaaggaataagacagtggtggaagctcaaacctggcccaccaccaccaaagcccgcagagcggcataaggacgacagcaggggtcttgtgcttcctgggtacaagtacctcggacccttcaacggactcgacaagggggagccggtcaacgaggcagacgccgcggccctcgagcacgacaaggcctacgaccggcagctcgacagcggagacaacccgtacctcaagtacaaccacgccgacgcagagtttcaggagcgccttaaagaagatacgtcttttgggggcaacctcggacgagcagtcttccaggcgaaaaagagggttcttgaacctctgggcctggttgaggagcctgttaagacggctccgggaaaaaagaggccggtagagcactctcctgtggagccagactcctcctcgggaaccggaaaagcgggccagcagcctgcaagaaaaagattaaattttggtcagactggagacgcagactccgtacctgacccccagcctctcggacagccaccagcagccccctctggtctgggatctactacaatggctacaggcagtggcgcaccaatggcagacaataacgagggtgccgatggagtgggtaattcctcaggaaattggcattgcgattcccaatggctgggcgacagagtcatcaccaccagcacccgaacctgggccctgcccacatacaacaaccacctctacaagcaaatctccagccaatcaggagccagcaacgacaaccactactttggctacagcaccccctgggggtattttgacttcaacagattccactgccacttttcaccacgtgactggcaaagactcgtcaacaacaaccggggattccggcccaaaagactcaacttcaagctctttaatattcaagtcaaagaggtcacgcagaatgacggtacgacgacgattgccaataaccttaccagcacggttcaggtgtttactgactcggagtaccagctcccgtacgtcctgggctcggcgcatcaaggatgcctcccgccgtttccagcggacgtcttcatggtcccacagtatggatacctcaccctgaacaacgggagtcaggcggtaggacgctcttccttttactgcctggagtactttccttctcagatgctgcgtactggaaacaactttcagttcagctacacttttgaagacgtgcctttccacagcagctacgctcacagccagagtctggatcggctgatgaatcctctgatcgaccagtacctgtattatctgaacaagacacaaacaaatagtggaactcttcagcagtctcggctactgtttagccaagctggaccaaccaacatgtctcttcaagctaaaaactggctgcctggaccttgctacagacagcagcgtctgtcaaaacaggcaaacgacaacaacaacagcaactttccctggactgcagctacaaagtatcatctaaatggccgggactcgttggttaatccaggaccagctatggccagtcacaaggatgacgaagaaaagtttttccccatgcatggaaccctgatatttggtaaacaaggaacaaatgccaacgacgcggatttggaaaatgtcatgattacagatgaagaagaaatcagggccaccaatcccgtggctacggagcagtacgggactgtgtcaaataatttgcaaaactcaaacactggtccaactactggaactgtcaatcaccaaggagcgttacctggtatggtgtggcaggatcgagacgtgtacctgcagggacccatttgggccaagattcctcacaccgatggacactttcatccttctccactgatgggaggttttggactcaaacacccgcctcctcagatcatgatcaaaaacactcccgttccagccaatcctcccacaaacttcagttctgccaagtttgcttctttcatcacacagtattccacgggacaggtcagcgtggagatcgagtgggagctgcagaaggagaacagcaaacgctggaatcccgaaattcagtacacttccaactacaacaagtctgttaatgtggactttactgtggacactaatggtgtgtattcagagcctcgccccattggcaccagatacctgactcgtaatctgtaa

SEQ ID NO: 129 - DNA, 2217 bp, Adeno-associated virus
atggctgctgacggttatcttccagattggctcgaggacaacctctctgagggcattcgcgagtggtgggacctgaaacctggagcccccaagcccaaggccaaccagcagaagcaggacgacggccggggtctggtgcttcctggctacaagtacctcggacccttcaacggactcgacaagggggagcccgtcaacgcggcggacgcagcggccctcgagcacgacaaggcctacgaccagcagctcaaagcgggtgacaatccgtacctgcggtataaccacgccgacgccgagtttcaggagcgtctgcaagaagatacgtcttttgggggcaacctcgggcgagcagtcttccaggccaagaagcgggttctcgaacctctcggtctggttgaggaagctgctaagacggctcctggaaagaagagaccggtagaaccgtcacctcagcgttcccccgactcctccacgggcatcggcaagaaaggccagcagcccgctaaaaagagactgagctttggtcagactggcgactcagagtcagtccccgaccctcaaccaatcggagaaccaccagcaggcccctctggtctgggatctggtacaatggctgcaggcggtggcgctccaatggcagacaataacgaaggcgccgacggagtgggtagttcctcaggaaattggcattgcgattccacatggctgggcgacagagtcatcaccaccagcacccgaacctgggccctgcccacctacaacaaccacctctacaagcaaatatccaatgggacatcgggaggaagcaccaacgacaacacctacttcggctacagcaccccctgggggtattttgacttcaacagattccactgccacttctcaccacgtgactggcagcgactcatcaacaacaactggggattccggccaaaaagactcagcttcaagctcttcaacatccaggtcaaggaggtcacgcagaatgaaggcaccaagaccatcgccaataaccttaccagcacgattcaggtatttacggactcggaataccagctgccgtacgtcctcggctccgcgcaccagggctgcctgcctccgttcccggcggacgtcttcatgattccccagtacggctaccttacactgaacaatggaagtcaagccgtaggccgttcctccttctactgcctggaatattttccatctcaaatgctgcgaactggaaacaattctgaattcagctacaccttcgaggacgtgcctttccacagcagctacgcacacagccagagcttggaccgactgatgaatcctctcatcgaccagtacctgtactacttatccagaactcagtccacaggaggaactcaaggtacccagcaattgttattttctcaagctgggcctgcaaacatgtcggctcaggctaagaactggctacctggaccttgctaccggcagcagcgagtctctacgacactgtcgcaaaacaacaacagcaactttgcttggactggtgccaccaaatatcacctgaacggaagagactctttggtaaatcccggtgtcgccatggcaacccacaaggacgacgaggaacgcttcttcccgtcgagtggagtcctgatgtttggaaaacagggtgctggaagagacaatgtggactacagcagcgttatgctaaccagcgaagaagaaattaaaaccactaaccctgtagccacagaacaatacggtgtggtggctgacaacttgcagcaaaccaatacagggcctattgtgggaaatgtcaacagccaaggagccttacctggcatggtctggcagaaccgagacgtgtacctgcagggtcccatctgggccaagattcctcacacggacggcaacttccacccttcaccgctaatgggaggatttggactgaagcacccacctcctcagatcctgatcaagaacacgccggtacctgcggatcctccaacaacgttcagccaggcgaaattggcttccttcattacgcagtacagcaccggacaggtcagcgtggaaatcgagtgggagctgcagaaggagaacagcaaacgctggaacccagagattcagtacacttcaaactactacaaatctacaaatgtggactttgctgtcaatacagagggaacttattctgagcctcgccccattggtactcgttacctcacccgtaatctgtaa

SEQ ID NO: 130 - DNA, 2217 bp, Adeno-associated virus
atggctgctgacggttatcttccagattggctcgaggacaacctctctgagggcattcgcgagtggtgggacctgaaacctggagcccccaagcccaaggccaaccagcagaagcaggacgacggccggggtctggtgcttcctggctacaagtacctcggacccttcaacggactcgacaagggggagcccgtcaacgcggcggacgcagcggccctcgagcacgacaaggcctacgaccagcagctcaaagcgggtgacaatccgtacctgcggtataaccacgccgacgccgagtttcaggagcgtctacaagaagatacgtcttttgggggcaacctcgggcgagcagtcttccaggccaagaagcgggttctcgaacctctcggtccggttgaggaagctgctaagacggctcctggaaagaagagaccggtagaaccgccacctcagcgttcccccgactcctccacgggcatcggcaagaaaggccagcagcccgctaaaaagagactgaactttggtcagactggcgactcagagtcagtccccgaccctcaaccaatcggagaaccaccagcaggcccctctggtctgggatctggtacaatggctgcaggcggtggcgctccaatggcagacaataacgaaggcgccgacggagtgggtagttcctcaggaaattggcattgcgattccacatggctgggcgacagagtcatcaccaccagcacccgaacctgggccctgcccacctacaacaaccacctctacaagcaaatatccaatgggacatcgggaggaagcaccaacgacaacacctacttcggctacagcaccccctgggggtattttgacttcaacagattccactgccacttctcaccacgtgactggcagcgactcatcaacaacaactggggattccggccaaaaagactcagcttcaagctcttcaacatccaggtcaaggaggtcacgcagaatgaaggcaccaagaccgtcgccaataaccttaccagcacgattcaggtatttacggactcggaataccagctgccgtacgtcctcggctccgcgcaccagggctgcctgcctccgttcccggcggacgtcttcatgattccccagtacggctaccttacactgaacaatggaagtcaagccgtaggccgttcctccttctactgcctggaatattttccatctcaaatgctgcgaactggaaacaattttgaattcagctacaccttcgaggacgtgcctttccacagcagctacgcacacagccagagcttggaccgactgatgaatcctctcatcgaccagtacctgtactacttatccagaactcagtccacaggaggaactcaaggtacccagcaattgttattttctcaagctgggcctgcaaacatgtcggctcaggctaagaactggctacctggaccttgctaccggcagcagcgagtctctacgacactgtcgcaaaacaacaacagcaactttgcttggactggtgccaccaaatatcacctgaacggaagagactctttggtaaatcccggtgtcgccatggcaacccacaaggacgacgaggaacgcttcttcccgtcgagtggagtcctgatgtttggaaaacagggtgctggaagagacaatgtggactacagcagcgttatgctaaccagcgaagaagaaattaaaaccactaaccctgtagccacagaacaatacggtgtggtggctgacaacttgcagcaaaccaatacagggcctattgtgggaaatgtcaacagccaaggagccttacctggcatggtctggcagaaccgagacgtgtacctgcagggtcccatctgggccaagattcctcacacggacggcaacttccacccttcaccgctaatgggaggatttggactgaagcacccacctcctcagatcctgatcaagaacacgccggtacctgcggatcctccaacaacgttcagccaggcgaaattggcttccttcattacgcagtacagcaccggacaggtcagcgtggaaatcgagtgggagctgcagaaggagaacagcaaacgttggaacccagagattcagtacacttcaaactactacaaatctacaaatgtggactttgctgtcaatacagagggaacttattctgagcctcgccccattggtactcgttacctcacccgtaatctgtaa

SEQ ID NO: 131 - DNA, 2217 bp, Adeno-associated virus
atggctgctgacggttatcttccagattggctcgaggacaacctctctgagggcattcgcgagtggtgggacctgaaacctggagcccccaagcccaaggccaaccagcagaagcaggacgacggccggggtctggtgcttcctggctacaagtacctcggacccttcaacggactcgacaagggggagcccgtcaacgcggcggacgcagcggccctcgagcacgacaaggcctacgaccagcagctcaaagcgggtgacaatccgtacctgcggtataaccacgccgacgccgagtttcaggagcgtctgcaagaagatacgtcttttgggggcaacctcgggcgagcagtcttccaggccaagaagcgggttctcgaacctctcggtctggttgaggaagcggctaagacggctcctggaaagaagagaccggtagaaccgtcacctcagcgttcccccgactcctccacgggcatcggcaagaaaggccagcagcccgctaaaaagagactgaactttggtcagactggcgactcagagtcagtccccgaccctcaaccaatcggagaaccaccagcaggcccctctggtctgggatctggtacaatggctgcaggcggtggcgctccaatggcagacaataacgaaggcgccgacggagtgggtagttcctcaggaaattggcattgcgattccacatggctgggcgacagagtcatcaccaccagcacccgaacctgggccctgcccacctacaacaaccacctctacaagcaaatatccaatgggacatcgggaggaagcaccaacgacaacacctacttcggctacagcaccccctgggggtattttgacttcaacagattccactgccacttctcaccacgtgactggcagcgactcatcaacaacaactggggattccggccaaaaagactcagcttcaagctcttcaacatccaggtcaaggaggtcacgcagaatgaaggcaccaagaccatcgccaataaccttaccagcacgattcaggtatttacggactcggaataccagctgccgtacgtcctcggctccgcgcaccagggctgcctgcctccgttcccggcggacgtcttcatgattccccagtacggctaccttacactgaacaatggaagtcaagccgtaggccgttcctccttctactgcctggaatattttccatctcaaatgctgcgaactggaaacaattttgaattcagctacaccttcgaggacgtgcctttccacagcagctacgcacacagccagagcttggaccgactgatgaatcctctcatcgaccagtacctgtactacttatccagaactcagtccacaggaggaactcaaggtacccagcaattgttattttctcaagctgggcctgcaaacatgtcggctcaggctaagaactggctacctggaccttgctaccggcagcagcgagtctctacgacactgtcgcaaagcaacaacagcaactttgcttggactggtgccaccaaatatcacctgaacggaagagactctttggtaaatcccggtgtcgccatggcaacccacaaggacgacgaggaacgcttcttcccgtcgagtggagtcctgatgtttggaaaacagggtgctggaagagacaatgtggactacagcagcgttatgctaaccagcgaagaagaaattaaaaccactaaccctgtagccacagaacaatacggtgtggtggctgacaacttgcagcaaaccaatacagggcctattgtgggaaatgtcaacagccaaggagccttacctggcatggtctggcagaaccgagacgtgtacctgcagggtcccatctgggccaagattcctcacacggacggcaacttccacccttcaccgctaatgggaggacttggactgaagcacccacctcctcagatcctgatcaagaacacgccggtacctgcggatcctccaacaacgttcagccaggcgaaattggcttccttcattacgcagtacagcaccggacaggtcagcgtggaaatcgagtgggagctgcagaaggagaacagcaaacgctggaacccagagattcagtacacttcaaactactacaaatctacaaatgtggactttgctgtcaatacagagggaacttattctgagcctcgccccattggtactcgttacctcacccgtaatctgtaa

SEQ ID NO: 132 - DNA, 2214 bp, Adeno-associated virus
atggctgctgacggttatcttccagattggctcgaggacaacctctctgagggcattcgcgagtggtgggacctgaaacctggagcccccaagcccaaggccaaccagcagaagcaggacgacggccggggtctggtgcttcctggctacaagtacctcggacccttcaacggactcgacaagggggagcccgtcaacgcggcggacgcagcggccctcgagcacgacaaggcctacgaccagcagctcaaagcgggtgacaatccgtacccgcggtataaccacgccgacgccgagtttcaggagcgtctgcaagaagatacgccttttgggggcaacctcgggcgagcagtcttccaggccaagaagcgggttctcgaacctctcggtctggttgaggaagctgctaagacggctcctggaaagaagagaccggtagaaccgtcacctcagcgttcccccgactcctccacgggcatcggcaagaaaggccagcagcccgctaaaaagagactgaactttggtcagactggcgactcagagtcagtccccgaccctcaaccaatcggagaaccaccagcaggcccctctggtctgggatctggtacaatggctgcaggcggtggcgctccaatggcagacaataacgaaggcgccgacggagtgggtaatgcctcaggaaattggcattgcgattccacatggctgggcgacagagtcatcaccaccagcacccgcacctgggccttgcccacctacaataaccacctctacaagcaaatctccagtgcttcaacgggggccagcaacgacaaccactacttcggctacagcaccccctgggggtattttgatttcaacagattccactgccacttttcaccacgtgactggcagcgactcatcaacaacaattggggattccggcccaagagactcaacttcaaactcttcaacatccaagtcaaggaggtcacgacgaatgatggcgtcacaaccatcgctaataaccttaccagcacggttcaagtcttctcggactcggagtaccagcttccgtacgtcctcggctctgcgcaccagggctgcctccctccgttcccggcggacgtgttcatgattccgcaatacggctacctgacgctcaacaatggcagccaagccgtgggacgttcatccttttactgcctggaatatttcccttctcagatgctgagaacgggcaacaactttaccttcagctacacctttgaggaagtgcctctccacagcagctacgcgcacagccagagcctggaccggctgatgaatcctctcatcgtccaatacctgtattacctgaacagaactcaaaatcagtccggaagtgcccaaaacaaggacttgctgttcagccgtgggtctccagctggcatgtctgttcagcccaaaaactggctacctggaccctgttatcggcagcagcgcgtttctaaaacaaaaacagacaacaacaacagcaattttacctggactggtgcttcaaaatataacctcaatgggcgtgaatccatcatcaaccctggcactgctatggcctcacacaaagacgacgaagacaagttctttcccatgagcggtgtcatgatttttggaaaagagagcgccggagcttcaaacactgcattggacaatgtcatgattacagacgaagaggaaattaaagccactaaccctgtggccaccgaaagatttgggaccgtggcagtcaatttccagagcagcagcacagaccctgcgaccggagatgtgcatgctatgggagcattacctggcatggtgtggcaagatagagacgtgtacctgcagggtcccatttgggccaaaattcctcacacagatggacactttcacccgtctcctcttatgggcggctttggactcaagaacccgcctcctcagatcctcatcaaaaacacgcctgttcctgcgaatcctccggcggagttttcagctacaaagtttgcttcattcatcacccaatactccacaggacaagtgagtgtggaaattgaatgggagctgcagaaagaaaacagcaagcgctggaatcccgaagtgcagtacacatccaattatgcaaaatctgccagcgttgattttactgtggacaacaatggactttatactgagcctcgccccattggcacccgttaccttacccgtcccctgtaa

SEQ ID NO: 133 - DNA, 2211 bp, Adeno-associated virus
atggctgccgatggttatcttccagattggctcgaggacactctctctgaaggaataagacagtggtggaagctcagacctggcccaccaccaccaaagcccgcagagcggcataaggacgacagcaggggtcttgtgcttcctgggtacaagtacctcggacccttcaacggactcgacaagggagagccggtcaacgaggcagacgccgcggccctcgagcacgacaaagcctacgaccggcagctcgacagcggagacaacccgtacctcaagtacaaccacgccgacgcggagtttcaggagcgccttaaagaagatacgtcttttgggggcaacctcgggcgagcagtcttccaggccaagaagcgggttctcgaacctctcggtctggttgaggaaggcgctgagacggctcctggaaagaaacgtccggtagagcagtcgccacaagggccagactcctcctcgggcatcggcaagacaggccagcagcccgctaaaaagagactcaattttggtcagactggcgactcagagtcagtccccgatccacaacctctcggagaacctccagcaacccccgctgctgtgggacctactacaatggcttcaggcggtggcgcaccaatggcagacaataacgaaggcgccgacggagtgggtaatgcctcaggaaattggcattgcgattccacatggctgggcgacagagtcatcaccaccagcacccgcacctgggccttgcccacctacaataaccacctctacaagcaaatctccagtgcttcaacgggggccagcaacgacaaccactacttcggctacagcaccccctgggggtattttgatttcaacagattccactgccacttttcaccacgtgactggcagcgactcatcaacaacaattggggattccggcccaagagactcaacttcaaactcttcaacatccaagtcaaggaggtcacgacgaatgatggcgtcacaaccatcgctaataaccttaccagcacggttcaagtcttctcggactcggagtaccagcttccgtacgtcctcggctctgcgcaccagggctgcctccctccgttcccggcggacgtgttcatgattccgcaatacggctacctgacgctcaacaatggcagccaagccgtgggacgttcatccttttactgcctggaatatttcccttctcagatgctgagaacgggcaacaactttaccttcagctacacctttgaggaagtgcctttccacagcagctacgcgcacagccagagcctggaccggctgatgaatcctctcatcgaccaatacctgtattacccgaacagaactcaaaatcagtccggaagtgcccaaaacaaggacttgctgtttagccgtgggtctccagctggcatgtctgttcagcccaaaaactggctacctggaccctgttatcggcagcagcgcgtttctaaaacaaaaacagacaacaacaacagcaattttacctggactggtgcttcaaaatataacctcaatgggcgtgaatccatcatcaaccctggcactgctatggcctcacacaaagacgacgaagacaagttctttcccatgagcggtgtcatgatttttggaaaagagagcgccggagcttcaaacactgcattggacaatgtcatgattacagacgaagaggaaattaaagccactaaccctgtggccaccgaaagatttgggaccgtggcagtcaatttccagagcagcagcacagaccctgcgaccggagatgtgcatgctatgggagcattacctggcatggtgtggcaaggtagagacgtgtacctgcagggtcccatttgggccaaaattcctcacacagatggacactttcacccgtctcctcttatgggcggctttggactcaagaacccgcctcctcagatcctcatcaaaaacacgcctgttcctgcgaatcctccggcggagttttcagctacaaagtttgcttcattcatcacccaatactccacaggacaagtgagtgtggaaattgaatgggagctgcagaaagaaaacagcaagcgctggaatcccgaagtgcagtacacatccaattatgcaaaatctgccaacgttgattttactgtggacaacaatggactttatactgagcctcgccccattggcacccgttaccttacccgtcccctgtaa

SEQ ID NO: 134 - DNA, 2208 bp, Adeno-associated virus
atggctgccgatggctatcttccagattggctcgaggacactctctctgaaggaataagacagtggtggaagctcaaacctggcccaccaccaccaaagcccgcagagcggcatagggacgacagcaggggtcttgtgcttcctgggtacaagtacctcggacccttcaacggactcgacaagggagagccggtcaacgaggcagacgccgcggccctcgagcacgacaaagcctacgaccggcagctcgacagcggagacaacccgtacctcaagtacaaccacgccgacgcggagtttcaggagcgccttaaagaagatacgtcttttgggggcaacctcggacgagcagtcttccaggcgaaaaagagggttcttgaacctctgggcctggttgaggaacctgttaagacggctccgggaaaaaagaggccggtagagcactctcctgtggagccagactcctcctcgggaaccggaaaggcgggccagcagcctgcaagaaaaagattgaattttggtcagactggagacgcagactcagtacctgacccccagcctctcggacagccaccagcagccccctctggtctgggaactaatacgatggctacaggcagtggcgcaccaatggcagacaataacgagggcgccgacggagtgggtaattcctcgggaaattggcattgcgattccacatggatgggcgacagagtcatcaccaccagcacccgaacctgggccctgcccacctacaacaaccacctctacaaacaaatttccagccaatcaggagcctcgaacgacaatcactactttggctacagcaccccttgggggtattttgacttcaacagattccactgccacttttcaccacgtgactggcaaagactcatcaacaacaactggggattccgacccaagagactcaacttcaagctctttaacattcaagtcaaagaggtcacgcagaatgacggtacgacgacgattgccaataaccttaccagcacggttcaggtgtttactgactcggggtaccagctcccgtacgtcctcggctcggcgcatcaaggatgcctcccgccgttcccagcagacgtcttcatggtgccacagtatggataccccaccctgaacaacgggagtcaggcagtaggacgctcttcattttactgcctggagtactttccttctcagatgctgcgtaccggaaacaactttaccttcagctacacttttgaggacgttcctttccacagcagctacgctcacagccagagtctggaccgtctcatgaatcctctcatcgaccagtacctgtattacttgagcacaacaaacactccaagtggaaccaccacgcagtcaaggcttcagttttctcaggccggagcgagtgacattcgggaccagtctaggaactggcttcctggaccctgttaccgccagcagcgagtatcaaagacatctgcggataacaacaacagtgaatactcgtggactggagctaccaagtaccacctcaatggcagagactctctggtgaatccgggcccggccgtggcaagccacaaggacgatgaagaaaagttttttcctcagagcggggttctcatctttgggaagcaaggctcagagaaaacaaatgtggacattgaaaaggtcatgattacagacgaagaggaaatcaggacaaccaatcccgtggctacggagcagtatggttctgtatctaccaacctccagagaggcaacagacaagcagctaccgcagatgtcaacacacaaggcgttcttccaggcatggtctggcaggacagagatgtgtaccttcaggggcccatctgggcaaagattccacacacggacggacattttcacccctctcccctcatgggtggattcggacttaaacaccctcctccacagattctcatcaagaacaccccggtacctgcgaatccttcgaccaccttcagtgcggcaaagtttgcttccttcatcacacagtactccacgggacaggtcagcgtggagatcgagtgggagctgcagaaggaaaacagcaaacgctggaatcccgaaattcagtacacttccaactacaacaagtctgttaatgtggactttactgtggacactaatggcgtgtattcagagcctcgccccattggcaccagatacctgactcgtaatctgtaa

SEQ ID NO: 135 - DNA, 2211 bp, Adeno-associated virus
atggctgccgacggttatcttccagattggctcgaggacactctctctgaaggaataagacagtggtggaagctcaaacctggcccaccaccaccaaagcccgcagagcggcataaggacgacagcaggggtcttgtgcttcctgggtacaagtacctcggacccttcaacggactcgacaagggagagccggtcaacgaggcagacgccgcggccctcgagcacgacaaagcctacgaccggcagctcgacagcggagacaacccgtacctcaagtacaaccacgccgacgcggagtttcaggagcgccttaaagaagatacgtcttttgggggcaacctcgggcgggcagtcttccaggccaagaagcgggttctcgaacctctcggtctggttgaggaaggcgctaagacggctcctggaaagaaacgtccggtagagcagtcgccacaagagccagactccccctcgggcatcggcaagacaggccagcagcccgctaaaaagagactcaattttggtcagactggcgactcagagtcagtccccgatccacaacctctcggagaacctccagcaacccccgctgctgtgggacctactacaatggcttcaggcggtggcgcaccaatggcagacaataacgaaggcgccgacggagtgggtaatgcctcaggaaattggcactgcgattccacatggctgggcgacagagtcatcaccaccagcacccgcacctgggccttgcccacctacaataaccacctctacaagcaaatctccagtgcttcaacgggggccagcaacgacaaccactacttcggctacagcaccccctgggggtattttgatttcaacagattccactgccacttttcaccacgtgactggcagcgactcatcaacaacaattggggattccggcccaagagactcaacttcaaactcttcaacatccaagtcaaggaggtcacgacgaatgatggcgtcacaaccatcgctaataaccttaccagcacggttcaagtcttctcggactcggagtaccagcttccgtacgtcctcggctctgcgcaccagggccgcctccctccgttcccggcggacgtgttcatgattccgcaatacggctacctgacgctcaacaatggcagccaagccgtgggacgttcatcctcttactgcctggaatatttcccttctcagatgctgagaacgggcaacaactttaccttcagctacacctttgaggaagtgcctctccacagcagctgcgcgcacagccagagcctggaccggctgatgaatcctctcatcgaccaatacctgtattacctgaacagaactcaaaatcagtccggaagtgcccaaaacagggacttgctgttcagccgtgggtctccagctggcatgtctgttcagcccaaaaactggctacctggaccctgttatcggcagcagcgcgtttctaaaacaaaaacagacaacaacaacagcaattttacctggactggtgcttcaaaatataacctcaatgggcgtgaatccatcatcaaccctggcactgctatggcctcacacaaagacgacgaagacaagttctttcccatgagcggtgtcatgatttttggaaaagagagcgccggagcttcaaacactgcattggacaatgtcatgattacagacgaagaggaaattaaagccactaaccctgtggccaccgaaagatttgggaccgtggcagtcaatttccagagcagcagcacagaccctgcgaccggagatgtgcatgctatgggagcattacctggcatggtgtggcaagatagagacgtgtacctgcagggtcccatttgggccaaaattcctcacacagatggacactttcacccgtctcctcttatgggcggctttggactcaagaacccgcctcctcagatcctcatcaaaaacacgcctgttcctgcgaatcctccggcggagttttcagctacaaagtttgcttcattcatcacccaatactccgcaggacaagtgagtgtggaaattgaatgggagctgcagaaagaaaacagcaagcgctggaatcccgaagtgcagtacacatccaattatgcaaaatctgccaacgttgattttactgtggacaacaatggactttatactgagcctcgccccattggcacccgttaccttacccgtcccctgtaa

SEQ ID NO: 136 - DNA, 2208 bp, Adeno-associated virus
atggctgccgatggctatcttccagattggctcgaggacactctctctgaaggaataagacagtggtggaagctcaaacctggcccaccaccaccaaagcccgcagagcggcatagggacgacagcaggggtcttgtgcttcctgggtacaagtacctcggacccttcaacggactcgacaagggagagccggtcaacgaggcagacgccgcggccctcgagcacgacaaagcctacgaccggcagctcgacagcggagacaacccgtacctcaagtacaaccacgccgacgcggagtttcaggagcgccttaaagaagatacgtcttttgggggcaacctcggacgagcagtcttccaggcgaaaaagagggttcttgaacctctgggcctggttggggaacctgttaagacggctccgggaaaaaagaggccggtagagcactctcctgtggagccagactcctcctcgggaaccggaaaggcgggccagcagcctgcaagaaaaagattgaattttggtcagactggagacgcagactcagtacctgacccccagcctctcggacagccaccagcagccccctctggtctgggaactaatacgatggctacaggcagtggcgcaccaatggcagacaataacgagggcgccgacggagtgggtaattcctcgggaaattggcattgcgattccacatggatgggcgacagagtcatcaccaccagcacccgaacctgggccctgcccacctacaacaaccacctctacaaacaaatttccagccaatcaggagcctcgaacgacagtcactactttggctacagcaccccttgggggtattttgacttcaacagattccactgccacttttcaccacgtgactggcaaagactcatcaacaacaactggggattccgacccaagagactcaacttcaagctctttaacattcaagtcaaagaggtcacgcagaatgacggtacgacgacgattgccaataaccttaccagcacggttcaggtgtttactgactcggagtaccagctcccgtacgtcctcggctcggcgcatcaaggatgcctcccgccgttcccagcagacgtcttcatggtgccacagtatggatacctcaccctgaacaacgggagtcaggcagtaggacgctcttcattttactgcctggagtactttccttctcagatgctgcgtaccggaaacaactttaccttcagctacacttttgaggacgttcctttccacagcagctacgctcacagccagagtctggaccgtctcatgaatcctctcatcgaccagtacctgtattacttgagcacaacaaacactccaagtggaaccaccacgcagtcaaggctccagttttctcaggccggagcgagtgacattcgggaccagtctaggaactggcttcctggaccctgttaccgccagcagcgagtatcaaagacatctgcggataacaacaacagtgaatactcgtggactggagctaccaagtaccacctcaatggcagagactctctggtgaatccgggcccggccatggcaagccacaaggacaatgaagaaaagttttttcctcagagcggggttctcatctttgggaagcaaggctcagagaaaacaaatgtggacattgaaaaggtcatgattacagacgaagaggaaatcaggacaaccaatcccgtggctacggagcagtatggttctgtatctaccaacctccagagaggcaacagacaagcagctaccgcagatgtcaacacacaaggcgttcttccaggcatggtctggcaggacagagatgtgtaccttcaggggcccatctgggcaaagattccacacacggacggacattttcacccctctcccctcatgggtggattcggacttaaacaccctcctccacagattctcatcaagaacaccccggtacctgcgaatccttcgaccaccttcagtgcggcaaagtttgcttccttcatcacacagtactccacgggacaggtcagcgtggagatcgagtgggagctgcagaaggaaaacagcaaacgctggaatcccgaaattcagtacacttccaactacaacaagtctgttaatgtggactttactgtggacactaatggcgtgtattcagagcctcgccccattggcaccagatacctgactcgtaatctgtaa

SEQ ID NO: 137 - DNA, 2211 bp, Adeno-associated virus
atggctgccgatggttatcttccagattggctcgaggacaacctctctgagggcattcgcgagtggtgggacttgaaacctggagccccgaagcccaaagccaaccagcaaaagcaggacgacggccggggtctggtgcttcctggctacaagtacctcggacccttcaacggactcgacaagggggagcccgtcaacgcggcggacgcagcggccctcgagcacgacaaggcctacgaccagcagctcaaagcgggtgacaatccgtacctgcggtataaccacgccgacgccgagtttcaggagcgtctgcaagaagatacgtcttttgggggcaacctcgggcgagcagtcttccaggccaagaagcgggttctcgaacctctcggtctggttgaggaaggcgctaagacggctcctggaaagaaacgtccggtagagcagtcgccacaagagccagactcctcctcgggcatcggcaagacaggccagcagcccgctaaaaagagactcaattttggccagactggcgactcagagtcagtccccgatccacaacctctcggagaacctccagcaacccccgctgctgtgggacctactacaatggcttcaggcggtggcgcaccaatggcagacaataacgaaggcgccgacggagtgggtaatgcctcaggaaattggcattgcgattccacatggctgggcgacagagtcatcaccaccagcacccgcacctgggccttgcccacctacaataaccacctctacaagcaaatctccagtacttcaacgggggccagcaacgacaaccactacttcggctacggcaccccctgggggtattttgatttcaacagattccactgccacttttcaccacgtgactggcagcgactcatcaacaacaattggggattccggcccaagagactcaacttcaaactcttcaacatccaagtcgaggaggtcacgacgaatgatggcgtcacaaccatcgctaataaccttaccagcacggttcaagtcttctcggactcggagtaccagcttccgtacgtcctcggctctgcgcaccagggctgcctccctccgttcccggcggacgtgttcatgattccgcaatacggctacctgacgctcaacaatggcagccaagccgtgggacgttcatccttttactgcctggaatatttcccttctcagatgctgagaacgggcaacaactttaccttcagctacacctttgaggaagtgcctttccacagcagctacgcgcacagccagagcctggaccggctgatgaatcctctcatcgaccaatacctgtattacctgaacagaacacaaaatcagtccggaagtgcccaaaacaaggacttgctgtttagccgtgggtctccagctggcatgtctgttcagcccaaaaactggctacctggaccctgttatcggcagcagcgcgtttctaaaacaaaaacagacaacaacaacagcaattttacctggactggtgcttcaaaatataacctcaatgggcgtgaatccatcatcaaccctggcaccgctgtggcctcacacaaagacgacgaagacaagttctttcccatgagcggtgtcatgatttttggaaaagagagcgccggagcttcaagcactgcattggacaatgtcatgattacagacgaagaggaaattaaagccactaaccctgtggccaccgaaagatttgggaccgtggcagtcaatttccagagcagcagcacagaccctgcgaccggagatgtgcatgctatgggagcattacctggcatggtgtggcaagatagagacgtgtacctgcagggtcccatttgggccaaaattcctcacacagatggacactttcacccgtctcctcttatgggcggctttggactcaagaacccgcctcctcagatcctcatcaaaaacacgcctgttcctgcgaatcctccggcggagttttcagctacaaagtttgcttcattcatcacccaatactccacaggacaagtgagtgtggaaattgaatgggagctgcagaaagaaaacagcaagcgctggaatcccgaagtgcagtacacatccaattatgcaaaatctgccaacgttgattttactgtggacaacaatggactttatactgagcctcgccccattggcacccgttaccttacccgtcccctgtaa

SEQ ID NO: 138 - DNA, 2208 bp, Adeno-associated virus
atggctgccgatggttatcttccagattggctcaaggacactctctctgaaggaataagacagtggtggaagctcaaacctggcccaccaccaccaaagcccgcagagcggcataaggacgacagcgggggtcttgtgcttcctgggtacaagtacctcggacccttcaacggactcgacaagggagagccggtcaacgaggcagacgccgcggccctcgagtacgacaaggcctacgaccggcagctcgacagcggagacaacccgtacctcaagtacaaccacgccgacgcggagtttcaggagcgccttaaagaagatacgtcttttgggggcaacctcggacgagcagtcttccaggcgaaaaagagggttcttgaacctctgggcctggttgaggaacctgttaagacggctccgggaaaaaagaggccggtagagcactctcctgtggagccagactcctcctcgggaacaggaaaagcgggccagcagcctgcgagaaagagattgaattttggtcagactggagacgcagactccgtacctgacccccagcctctcggacagccaccagcagccccctctggtctgggaactaatacgatggctacaggcagtggcgcaccaatggcagacaataacgagggcgccgacggagtgggtaattcctcgggaagttggcattgcgattccacatggatgggcgacagagtcatcaccaccagcacccgaacctgggctctgcccacctacaacaaccatctgtacaagcagatctccagccaatcaggagccagcaacgacaaccactactttggctacagcaccccttgggggtattttgacttcaacagattccactgccacttttcaccacgtgactggcaaagactcatcaacaacaactggggattccggcccaagagactcaacttcaagctctttaacattcaagtcaaggaggtcacgcagaatgacggtacgacgacgattgccaataaccttaccagcacggttcaggtgtttactgactcggagtaccagctcccgtacgtccccggctcggcgcatcaaggatgcctcccgccgttcccagcagacgtcttcatggtgccacagtatggatacctcaccctgaacaacgggagtcaggcagtaggacgctcttcattttactgcctggagtactttccttctcagatgcttcgtaccggaaacaactttaccttcagctacacctttgaggatgttcctttccacagcagctacgctcacagccagagtttggaccgtctcatgaatcctctcatcgaccagtacctgtattacttgagcagaacaaacactccaagcggaaccaccacgcagtccaggcttcagttttctcaggccggagcaagtgacattcgggaccagtctaggaactggcttcctggaccctgttaccgccagcagcgagtatcaaagacagctgcggacaacaacaacagtgaatactcgtggactggagctaccaagtaccacctcaatggcagagactctctggtgaatccgggcccggccatggccagccacaaggacgatgaagaaaagttttttcctcaaagcggggttctcatctttgggaagcaaggctcagagaaaacaaatgtggacattgaaaaggtcatgattacagacgaagaggaaatcagaaccaccaatcccgtggccacggagcagtatggttctgtatctaccaacctccagagcggcaacacacaagcagctactgcagatgtcaacacacaaggcgttcttccaggcatggtctggcaggacagagacgtgcacctgcaggggcctatctgggcaaagattccacacacggacggacattttcacccctctcccctcatgggcggatttggacttaaacaccctcctccacagattctcatcaagaacaccccggtacctgcaaatccttcgaccaccttcagtgcggcaaagtttgcttccttcatcacacagtattccacagggcaggtcagcgtggagatcgagtgggagctgcagaaggagaacagcaaacgctggaaccccgagatccagtacacttccaactacaacaaatctgttaatgtggactttactgtggacactaatggtgtgtattcagagcctcgccccattggcaccagatacctgactcgtaatctgtaa

SEQ ID NO: 139 - DNA, 2208 bp, Adeno-associated virus
atggctgccgatggttatcttccagattggctcgaggacactctctctgaaggaataagacagtggtggaagctcaaacctggcccaccaccaccaaagcccgcagagcggcataaggacgacagcaggggtcttgtgcttcctgggtacaagtacctcggacccttcaacggactcgacaagggagagccggtcaacgaggcagacgccgcggccctcgagcacgacaaagcctacgaccggcagctcgacagcggagacaacccgtacctcaagtacaaccacgccgacgcggagtttcaggagcgccttaaagaagatacgtcttttgggggcaacctcggacgagcagtcttccaggcgaaaaagagggttcttgaacctctgggcctggttggggaacctgtcaagacggctccaggaaaaaagaggccggtagagcactctcctgtggagccagactcctcctcgggaaccggaaaggcgggccagcagcctgcaagaaaaagattgaattttggtcagactggagacgcagactcagtacctgacccccagcctctcggacagccaccagcagccccctctggtctgggaactaatacgatggctacaggcagtggcgcaccaatggcagacaataacgagggcgccgacggagtgggtaattcctcgggaaattggcattgcgattccacatggatgggcgacagagtcatcaccaccagcacccgaacctgggccctgcccacctacaacaaccacctctacaaacaaatttccagccaatcaggagcctcgaacgacaatcactactttggctacagcaccccttgggggtattttgacttcaacagattccactgccacttttcaccacgtgactggcaaagactcatcaacaacaactggggattccgacccaagagactcaacttcaagctctttaacattcaagtcaaagaggtcacgcagaatgacggtacgacgacgattgccaataaccttaccagcacggttcaggtgtttactgactcggagtaccagctcccgtacgtcctcggctcggcgcatcaaggatgcctcccgccgttcccagcagacgtcttcatggtgccacagtatggatacctcaccctgaacaacgggagtcaggcagtaggacgctcttcattttactgcctggagtactttccttctcagatgctgcgtaccggaaacaactttaccttcagctacacttttgaggacgttcctttccacagcggctacgctcacagccagagtctggaccgtctcatgaatcctctcatcgaccagtacctgtattacttgagcacaacaaacactccaagtggaaccaccacgcagtcaaggcttcagttttctcaggccggagcgagtgacattcgggaccagtctaggaactggcttcctggaccctgttaccgccagcagcgagtatcaaagacatctgcggataacaacaacagtgaatactcgtggactggagctaccaagtaccacctcaatggcagagactctctggtgaatccgggcccggccatggcaagccacaaggacaatgaagaaaagttttttcctcagagcggggttctcatctttgggaagcaaggctcagagaaaacaaatgtggacattgaaaaggtcatgattacagacgaagaggaaatcaggacaaccaatcccgtggctacggagcagtacggttctgtatctaccaacctccagagaggcaacagacaagcagctaccgcagatgtcaacacacaaggcgttcttccaggcatggtctggcaggacagagatgtgtaccttcaggggcccatctgggcaaagattccacacacggacggacattttcacccctctcccctcatgggtggattcggacttaaacaccctcctccacagattctcatcaagaacaccccggtacctgcgaatccttcgaccaccttcagtgcggcaaagtttgcttccttcatcacacagtactccacgggacaggtcagcgtggagatcgagtgggagctgcagaaggaaaacagcaaacgctggaatcccgaaattcagtacacttccaactacaacaagtctgttaatgtggactttactgtggacactaatggcgtgtattcagagcctcgccccattggcaccagatacctgactcgtaatctgtaa

SEQ ID NO: 140 - DNA, 2208 bp, Adeno-associated virus
atggctgccgatggttatcttccagattggctcgaggacactctctctgaaggaataagacagtggtggaagctcaaacctggcccaccaccaccaaagcccgcagagcggcataaggacgacagcaggggtcttgtgcttcctgggtacaagtacctcggacccttcaacggactcgacaagggagagccggtcaacgaggcagacgccgcggccctcgagcacgacaaagcctacgaccggcagctcgacagcggagacaacccgtacctcaagtacaaccacgccgacgcggagtttcaggagcgccttaaagaagatacgtcttttgggggcaacctcggacgagcagtcttccaggcgaaaaagagggttcttgaacctctgggcctggttggggaacctgttaagacggctccgggaaaaaagaggccggtagagcactctcctgtggagccagactcctcctcgggaaccggaaaggcgggccagcagcctgcaagaaaaagattgaattttggtcagactggagacgcagactcagtacctgacccccagcctctcggacagccaccagcagccccctctggtctgggaactaatacgatggctacaggcagtggcgcaccaatggcagacaataacgagggcgccgacggagtgggtaattcctcgggaaatcggcattgcgattccacatggatgggcgacagagtcatcaccaccagcacccgaacctgggccctgcccacctacaacaaccacctctacagacaaatttccagccaatcaggagcctcgaacgacaatcactactttggctacagcaccccttgggggtattttgacttcaacagattccactgccacttttcaccacgtgactggcaaagactcatcaacaacaactggggattccgacccaagagactcaacttcaagctctttaacattcaagtcaaagaggtcacgcagaatgacggtacgacgacgattgccaataaccttaccagcacggttcaggtgtttactgactcggagtaccagctcccgtacgtcctcggctcggcgcatcaaggatgcctcccgccgttcccagcagacgtcttcatggtgccacagtatggatacctcaccctgagcaacgggagtcaggcagtaggacgctcttcattttactgcccggagtactttccttctcagatgctgcgtaccggaaacaactttaccttcagctacacttttgaggacgttcctttccacagcagctacgctcacagccagagtctggaccgtctcatgaatcctctcatcgaccagtacctgtattacttgagcacaacaaacactccaagtggaaccaccacgcagtcaaggcttcagttttctcaggccggagcgagtgacattcgggaccagtctaggaactggcttcctggaccctgttaccgccagcagcgagtatcaaagacatctgcggataacaacaacagtgaatactcgtggactggagctaccaagtaccacctcaatggcagagactctctggtgaatccgggcccggccatggcaagccacaaggacaatgaagaaaagttttttcctcagagcggggttctcatctttgggaagcaaggctcagagaaaacaaatgtggacattgaaaaggtcatgattacagacgaagaggaaatcaggacaaccaatcccgtggctacggagcagtatggttctgtatctaccaacctccagagaggcaacagacaagcagctaccgcagatgtcaacacacaaggcgttcttccaggcatggtctggcaggacagagatgtgtaccttcaggggcccatctgggcaaagattccacacacggacggacattttcacccctctcccctcatgggtggattcggacctaaacaccctcctccacagattctcatcaagaacaccccggtacctgcgaatccttcgaccaccttcagtgcggcaaagtttgcttccttcatcacacagtactccacgggacaggtcagcgtggagatcgagtgggagctgcagaaggaaaacagcaaacgctggaatcccgaaattcagtacacttccaactacaacaagtctgttaatgtggactttactgtggacactaatggcgtgtattcagagcctcgccccattggcaccagatacctgactcgtaatttgtaa

SEQ ID NO: 141 - DNA, 2205 bp, Adeno-associated virus
atggctgccgatggttatcttccagattggctcgaggacactctctctgaaggaataagacagtggtggaagctcaaacctggcccaccaccaccaaagcccgcagagcggcataaggacgacagcaggggtcttgtgcttcctgggtacaagtacctcggacccttcaacggactcgacaagggagagccggtcaacgaggcagacgccgcggccctcgagcacgacaaggcctacgaccggcagctcgacagcggagacaacccgtacctcaagtacaaccacgccgacgcggagtttcaggagcgtcttaaagaagatacgtcttttgggggcaacctcggacgagcagtcttccaggcgaaaaagagggttcttgaacctctgggcctggttgaggaacctgttaagacggctccgggaaaaaagaggccggtagagcactctcctgcggagccagactcctcctcgggaaccggaaaagcgggccagcagcctgcaagaaaaagactgaatttcggtcagactggagacgcagactccgtacctgacccccagcctctcagacagccaccagcagcccccacaagtttgggatctactacaatggctacaggcagtggcgcaccaatggcagacaataacgagggtgccgatggagtgggtaattcctcaggaaattggcattgcgattcccaatggctgggcgacagagtcatcaccaccagcacccgaacctgggccctgcccacctacaacaaccacctttacaagcaaatctccagccaatcaggagcctcaaacgacaaccactactttggctacagcaccccctgggggtattttgacttcaacagattccactgccacttttcaccacgtgactggcaaagactcatcaacaacaactggggattccgacccaagagactcaacttcaagctctttaacattcaagtcaaagaggtcacgcagaatgacggtacgacgacgattgccaataaccttaccagcacggttcaggtgtttactgactcggagtaccagctcccgtacgtcctcggctcggcgcatcaaggatgcctcccgccgtttccagcggacgtcttcatggtcccacagtatggatacctcaccctgaacaacgggagtcaggcggtaggacgctcttccttttactgcctggagtactttccttctcagatgctgcgtactggaaacaactttcagttcagctacacttttgaagacgtgcctttccacagcagctacgctcacagccagagtttggatcggctgatgaatcctctgatcgaccagtacctgtattatctaaacagaacacaaacagctagtggaactcagcagtctcggctactgtttagccaagctggacccacaagcatgtctcttcaagctaaaaactggctgcctggaccgtgttatcgccagcagcgtttgtcaaagcaggcaaacgacaacaacaacagcaactttccctggactggagctaccaagtactacctcaatggcagagactctttggtgaacccgggcccggccatggccagccacaaggacgatgaagaaaagtttttccccatgcatggaaccctaatatttggtaaagaaggaacaaatgctaccaacgcggaattggaaaatgtcatgattacagatgaagaggaaatcaggaccaccaatcccgtggctacagagcagtacggatatgtgtcaaataatttgcaaaactcaaatactgctgcaagtactgaaactgtgaatcaccaaggagcattacctggtatggtgtggcaggatcgagacgtgtacctgcagggacccatttgggccaagattcctcacaccgatggacactttcatccttctccactgatgggaggttttggactcaaacacccgcctcctcagattatgatcaaaaacactcccgttccagccaatcctcccacaaacttcagttctgccaagtttgcttccttcatcacacagtattccacgggacaggtcagcgtggagatcgagtgggagctgcagaaggagaacagcaaacgctggaatcccgaaattcagtacacttccaactacaacaaatctgttaatgtggactttactgtggacactaatggtgtgtattcagagcctcgccccattggcaccagatacctgactcgtaatctgtaa

SEQ ID NO: 142 - DNA, 2205 bp, Adeno-associated virus
atggctgccgatggttatcttccagattggctcgaggacactctctctgaaggaataagacagtggtggaagctcaaacctggcccaccaccaccaaagcccgcagagcggcataaggacgacagcaggggtcttgtgcttcctgggtacaagtacctcggacccttcaacggactcgacaagggagagccggtcaacgaggcagacgccgcggctctcgagcacgacaaggcctacgaccggcagctcgacagcggagacaacccgtacctcaagtacaaccacgccgacgcggagtttcaggagcgtcttaaagaagatacgtcttttgggggcaacctcggacgagcagtcttccaggcgaaaaagagggttcttgaacctctgggcctggttgaggaacctgttaagacggctccgggaaaaaagaggccggtagagcactctcctgcggagccagactcctcctcgggaaccggaaaagcgggccagcagcctgcaagaaaaagactgaatttcggtcagactggagacgcagactccgtacctgacccccagcctctcggacagccaccagcagcccccacaagtttgggatctactacaatggctacaggcagtggcgcaccaatggcagacaataacgagggtgccgatggagtgggtaattcctcaggaaattggcattgcgattcccaatggctgggcgacagagtcatcaccaccagcacccgaacctgggccctgcccacctacaacaaccacctttacaagcaaatctccagccaatcaggagcctcaaacgacaaccactactttggctacagcaccccctgggggtattttgacttcaacagattccactgccgcttttcaccacgtgactggcaaagactcatcaacaacaactggggattccgacccaagagactcaacttcaagctctttaacattcaagtcaaagaggtcacgcagaatgacggtacgacgacgattgccaataaccttaccagcacggttcaggtgtttactgactcggagtaccagctcccgtacgtcctcggctcggcgcatcaaggatgcctcccgccgtttccagcggacgtcttcatggtcccacagtatggatacctcaccctgaacaacgggagtcaggcggtaggacgctcttccttttactgcctggagtactttccttctcagatgctgcgtactggaaacaactttcagttcagctacacttttgaagacgtgcctttccacagcagctacgctcacagccagggtttggatcggctgatgaatcctctgatcgaccagtacctgtattatctaaacagaacacaaacagctagtggaactcagcagtctcggctactgtttagccaagctggacccacaagcatgtctcttcaagctaaaaactggctgcctggaccgtgttatcgccagcagcgtttgtcaaagcaggcaaacgacaacaacaacagcaactttccctggactggagctaccaagtaccacctcaatggcggagactctttggtgaacccgggcccggccatggccagccacaaggacgatgaagaaaagtttttccccatgcatggaaccctaatatttggtaaagaaggaacaaatgctaccaacgcggaattggaaaatgtcatgattacagatgaagaggaaatcaggaccaccaatcccgtggctacagagcagtacggatatgtgtcaaataatttgcaaaactcaaatactgctgcaagtactgaaactgtgaatcaccaaggagcattacctggtatggtgtggcaggatcgagacgtgtacctgcggggacccatttgggccaagattcctcacgccgatggacactttcatccttctccactgatgggaggttttggactcaaacacccgcctcctcagattatgatcaaaaacactcccgttccagccaatcctcccacaaacttcagttctgccaagtttgcttccttcatcacacagtattccacgggacaggtcagcgtggagatcgagtgggagctgcagaaggagaacagcaaacgctggaatcccgaaattcagtacacttccaactacaacaaatctgttaatgtggactttactgtggacactaatggtgtgtattcagagcctcgccccattggcaccagatacctgactcgtaatctgtaa

SEQ ID NO: 143 - DNA, 2205 bp, Adeno-associated virus
atggctgccgatggttatcttccagattggctcgaggacactctctctgaaggaataagacagtggtggaagctcaaacctggcccaccaccaccaaagcccgcagagcggcataaggacgacagcaggggtcttgtgcttcctgggtacaagtacctcggacccttcaacggactcgacaagggagagccggtcaacgaggcagacgccgcggccctcgagcacgacaaggcctacgaccggcagctcgacagcggagacaacccgtacctcaagtacaaccacgccgacgcggagtttcaggagcgtcttaaagaagatacgtcttttgggggcaacctcggacgagcagtcttccaggcgaaaaagagggttcttgaacctctgggcctggttgaggaacctgttaagacggctccgggaaaaaagaggccggtagagcactctcctgcggagccagactcctcctcgggaaccggaaaagcgggccagcagcctgcaagaaaaagactgaatttcggtcagactggagacgcagactccgtacctgacccccagcctctcggacagccaccagcagcccccacaagtttgggatctactacaatggctacaggcagtggcgcaccaatggcagacaataacgagggtgccgatggagtgggtaattcctcaggaaattggcattgcgattcccaatggctgggcgacagagtcatcaccaccagcacccgaacctgggccctgcccacctacaacaaccacctttacaagcaaatctccagccaatcaggagcctcaaacgacaaccactactttggctacagcaccccctgggggtattttgacttcaacagattccactgccacttttcaccacgtgactggcaaagactcatcaacaacaactggggattccgacccaagagactcaacttcaagctctttaacattcaagtcaaagaggtcacgcagaatgacggtacgacgacgattgccaataaccttaccagcacggttcaggtgtttactgactcggagtaccagctcccgtacgtcctcggctcggcgcatcaaggatgcctcccgccgtttccagcggacgtcttcatggtcccacagtatggatacctcaccctgaacaacgggagtcaggcggtaggacgctcttccttttactgcctggagtgctttccttctcagatgctgcgtactggaaacaactttcagttcagctacacttttgaagacgtgcctttccacagcagctacgctcacagccagagtttggatcggctgatgaatcctctgatcgaccagtacctgtattatctaaacagaacacaaacagctagtggaactcagcagtctcggctactgtttagccaagctggacccacaagcatgtctcttcaagctaaaaactggctgcctggaccgtgttatcgccagcagcgtttgtcaaagcaggcaaacgacaacaacaacagcaactttccctggactggagctaccaagtaccacctcaatggcagagactctttggtgaacccgggcccggccatggccagccacaaggacgatgaagaaaagtttttccccatgcatggaaccctaatatttggtaaagaaggaacaaatgctaccaacgcggaattggaaaatgtcatgattacagatgaagaggaaatcaggaccaccaatcccgtggctacagagcagtacggatatgtgtcaaataatttgcaaaactcaaatactgctgcaagtactgaaactgtgaatcaccaaggagcattacctggtatggtgtggcaggatcgagacgtgtacctgcagggacccatttgggccaagattcctcacaccgatggacactttcatccttctccactgatgggaggttttggactcaaacacccgcctcctcagattatgatcaaaaacactcccgttccagccaatcctcccacaaacttcagttctgccaagtttgcttccttcatcacacagtattccacgggacaggtcagcgtggagatcgagtgggagctgcagaaggagaacagcaaacgctggaatcccgaaattcagtacacttccaactacaacaaatctgttaatgtggactttactgtggacactaatggtgtgtattcagagcctcgccccattggcaccagatacctgactcgtaatctgtaa

SEQ ID NO: 144 - DNA, 2208 bp, Adeno-associated virus
atggctgccgatggttatcttccagattggctcgaggacactctctctgaaggaataagacagtggtggaagctcaaacctggcccaccaccaccaaagcccgcagagcggcataaggacgacagcaggggtcttgtgcttcctggatacaagtacctcggacccttcaacggactcgacaagggagagccggtcaacgaggcagacgccgcggccctcgagcacgacaaggcctacgaccggcagctcgacagcggagacaacccgtacctcaagtacaaccacgccgacgcggagtttcaggagcgccttaaagaagatacgtcttttgggggcaacctcggacgagcagtcttccaggcgaaaaagagggttcttgaacctctgggcctggttgaggaacctgttaagacggctccgggaaaaaagaggccggtagagcactctcctgtggagccagactcctcctcgggaaccggaaaagcgggcaaccagcctgcaagaaaaagattgaatttcggtcagactggagacgcagactccgtacctgacccccagcctctcggacagccaccagcatccccctctggtctgggaactaatacgatggctacaggcagtggcgcaccaatggcagacaataacgagggcgccgacggagtgggtaattcctcgggaaattggcattgcgattccacatggatgggcgacagagtcgtcaccaccagcacccgcacctgggccctgcccacctacaacaaccacctctacaagcagatttccagccaatcaggagccagcaacgacaaccactactttggctacagcaccccttgggggtattttgacttcaacagattccactgccacttttcgccacgcgactggcagagactcatcaacaacaactggggattccggcccaaaagactcaacttcaagctgtttaacattcaagtcaaggaggtcacgcagaatgacggtacgacgacgattgccaataaccttaccagcacggttcaggtgtttactgacttggagtaccagctcccgtacgtcctcggctcggcgcatcaaggatgcctcccgccgttcccagcagacgtcttcatggtgccacagtatggatacctcaccctgaacaacgggagtcaggcggtaggacgctcttccttttactgcctggagtactttccttctcagatgcttcgcaccggaaacaactttaccttcagctacacttttgaagacgttcctttccacagcagctacgctcacagtcaaagtctggaccgtctcatgaatcctctcatcgaccagtacctgtattacttgagcagaacaaacactccaagcggaaccactacgcagtccaggcttcagttttctcaggccggagcgagtgacattcgggaccagtctaggaactggcttcctggaccctgttaccgccagcagcgagtatcaaagacagctgcggataacaacaacagtgaatactcgtggactggagctaccaagtaccacctcaatggcagagactctctggtgaatccgggcccggccatggccagccacaaggacgatgaagaaaagttttttcctcaaagcggggttctcatctttgggaagcaaggctcagagaaaacaaatgtggacattgaaaaggtcatgattacagacgaagaggaaatcaggaccaccaatcccgtggctacggagcagtatggttctgtatctaccaacctccagagcggcaacacacaagcagctacctcagatgtcaacacacaaggcgttcttccaggcatggtctggcaggacagagacgtgtacctgcaggggcccatctgggcaaaaattccacacacggacggacattttcacccctctcccctcatgggcggatttggacttaaacaccctcctccacagattctcattaagaataccccggtacctgcgaatccttcgaccaccttcagcgcggcaaagtttgcttccttcatcacacagtattccacggggcaggtcagcgtggagatcgagtgggagctgcagaaggagaacagcaaacgctggaatcccgaaattcagtacacttccaactacaacaaatctgttaatgtggactttactgtggacactaatggggtgtattcagagcctcgccctattggcaccagatacctgactcgtaatctgtaa

SEQ ID NO: 145 - DNA, 2205 bp, Adeno-associated virus
atggctgccgatggttatcttccagattggctcgaggacactctctctgaaggaataagacagtggtggaagctcaaacctggcccaccaccaaagcccgcagagcggcataaggacgacagcaggggtcttgtgcttcctggatacaagtacctcggacccttcaacggactcgacaagggagagccggtcaacgaggcagacgccgcggccctcgagcacgacaaggcctacgaccggcagctcgacagcggagacaacccgtacctcaagtacaaccacgccgacgcggagtttcaggagcgccttaaagaagatacgtcttttgggggcaacctcggacgagcagtcttccaggcgaaaaagagggttcttgaacctctgggcctggttgaggaacctgttaagacggctccgggaaaaaagaggcccgtagagcactctcctgtggagccagactcctcctcgggaaccggaaaagcgggcaaccagcctgcaagaaaaagattgaatttcggtcagactggagacgcagactccgtacctgacccccagcctctcggacagccaccagcagccccctctggtctgggaactaatacgatggctacaggcagtggcgcaccaatggcagacaataacgagggcgccgacggagtgggtaattcctcgggagattggcattgcgattccacatggatgggcgacagagtcatcaccaccagcacccgcacctgggccctgcccacctacaacaaccacctctacaagcagatttccagccaatcaggagccagcaatgacaaccactactttggctacagcaccccttgggggtattttgacttcaacagattccactgccacttttcgccacgcgactggcagagactcatcaacaacaactggggattccggcccaaaagactcaacctcaagctgtttaacattcaagtcaaggaggtcacgcagaatgacggtacgacgacgattgccaataaccttaccagcacggttcaggtgtttactgacttggagtaccagctcccgtacgtcctcggctcggcgcatcaaggatgcctcccgccgttcccagcagacgtcttcatggtgccacagtatggatacctcaccctgaacaacgggagtcaggcggtaggacgctcttccttttactgcctggagtactttccttctcagatgcttcgtaccggaaacaactttaccttcagctacacttttgaagacgttcctttccacagcagctacgctcacagtcaaagtctggaccgtctcatgaatcctctcatcgaccagtacctgtattacttgagcagaacaaacactccaagcggaaccactacgcagtccaggcttcagttttctcaggccggagcgagtgacattcgggaccagtctaggaactggcttcctggaccctgttaccgccagcagcgagtatcaaagacagctgcggataacaacaacggtgaatactcgtggactggagctaccaagtaccacctcaatggcagagactctctggtgaatccgggcccggccatggccagccacaaggacgatgaagaaaagttttttcctcaaagcggggttctcatctttgggaagcaaggctcagagaaaacaaatgtggacattgaaaaggtcatgattacagacgaagaggaaatcaggaccaccaatcccgtggctacggagcagtatggttctgtatctaccaacctccagagcggcaacacacgagcagctacctcagatgtcaacacacaaggcgttcttccaggcatggtctggcaggacagagacgtgtacctgcaggggcccatctgggcaaaaattccacacacggacggacattttcacccctctcccctcatgggcggatttggacttaaacaccctcctccacagattctcattaagaataccccggtacctgcgaatccttcgaccaccttcagcgcggcaaagtttgcttccttcatcacacagtattccacggggcaggtcagcgtggagatcgagtgggagctgcagaaggagaacagcaaacgctggaatcccgaaattcagtacacttccaactacaacaaatctgttaatgtggactttactgtggacactaatggggtgtattcagagcctcgccctattggcaccagatacctgactcgtaatctgtaa

SEQ ID NO: 146 - DNA, 2208 bp, Adeno-associated virus
atggctgccgatggttatcttccagattggctcgaggacactctctctgaaggaataagacagtggtggaagctcaaacctggcccaccaccaccaaagcccgcagagcggcataaggacgacagcaggggtcttgtgcttcctgggtacaagtacctcggacccttcaacggactcgacaagggagagccggtcaacgaggcagacgccgcggccctcgagcacgacaaggcctacgaccggcagctcgacagcggagacaacccgtacctcaagtacgaccacgccgacgcggagtttcaggagcgccttaaagaagatacgtcttttgggggcaacctcggacgagcagtcttccaggcaaaaaagagggttcttgaacctctgggcctggttgaggagcctgttaagacggctccgggaaaaaagaggccggtagagcactctcctgtggagccagactcctcctcgggaaccggaaaagcgggcaaccagcctgcaagaaagagattgaatttcggtcagactggagacgcagactccgtacctgacccccagcctctcggacagccaccagcagccccctctggtctgggaactaatacgatggctacaggcagtggcgcaccaatggcagacaataacgatggcgccgacggagtgggtaattcctcgggaaattggcattgcgattccacatggatgggcgacagagtcatcaccaccagcacccgaacctgggctctgcccacctacaacaaccatctgtacaagcagatttccagccaatcaggagccagcaacgacaaccactactttggctacagcaccccttgggggtattttgacttcaacagattccactgccacttttcaccacgtgactggcaaagactcatcaacaacaactggggattccggcccaagagactcaacttcaagctctttaacattcaagtcagagaggtcacgcagaatgatggtacgacgacgattgccaataaccttaccagcacggttcaggtgtttactgactcggagtaccagctcccgtacgtcctcggctcggcgcatcaaggatgcctcccgccgttcccagcagacgtcttcatggtgccacagtatggatacctcaccctgaacaacgggagtcaggcagtaggacgctcttcattttactgcctggagtacttcccttctcagatgctgcgtaccggaaacaactttaccttcagctacacctttgaggatgttcctttccacagcagctacgctcacagccagagtttggaccgtctcatgaatcctctcatcgaccagtacctgtattacttgagcagaacaaacactccaagcggaaccaccacgcagtccaggcttcagttttctcaggccggagcgagtgacattcgggatcagtctaggaactggcttcctggaccctgttaccgccagcagcgagtatcaaagacatctgcggacaacaacaacagtgaatactcgtggattggagctaccaagtaccacctcaatggcagagactctctggtgaatccgggcccggcaatggccagccacaaggacgatgaagaaaagttttttcctcagagcggggttctcatctttggaaaacaaggatcagagaaaacaaatgtggacattgaaaaggtcatgattacagacgaagaggaaatcagaaccaccaatcccgtggccacggagcagtatggttctgtatctaccaacctccagagcggcaacacacaagcatctactgcagatgtcaacacacaaggcgttcttccaggcatggtctggcaggacagagacgtgtacctgcaggggcctatctgggcaaagattccgcacacggacggacattttcacccctctcccctcatgggcggattcggacttaaacaccctcctccacagattctcatcaaaaacaccccggtacctgcgaatccttcgaccaccttcagtgcggcaaagtttgcttccttcatcacacagtattccacggggcgggtcagcgtggagatcgagtgggagctacagaaggagaacagcaaacgctggaatcccgagatccagtacacttccaactacaacaaatctgttaatgtggactttactgtggacactaatggtgtgtattcagagcctcgccccattggcaccagatacctgactcgtaatctgtaa

SEQ ID NO: 147 - DNA, 2217 bp, Adeno-associated virus
atggctgccgatggttatcttccagattggctcgaggacaacctctctgagggcattcgcgagtggtgggacttgaaacctggagccccgaaacccaaagccaaccagcaaaagcaggacgacggccggggtctggtgcttcctggctacaagtacctcggacccttcaacggactcgacaagggggagcccgtcaacgcggcggacgcagcggccctcgagcacgacaaggcctacgaccagcagctcaaagcgggtgacaatccgtacctgcggtataaccacgccgacgccgagtttcaggagcgtctgcaagaagatacgtcttttgggggcaacctcgggcgagcagtcttccaggccaagaagcgggttctcgaacctctcggtctggttgaggaaggcgctaagacggctcctggaaagaagagaccggtagagccatcaccccagcgttctccagactcctctacgggcatcggcaagacaggccagcagcccgcgaaaaagagactcaactttgggcagactggcgactcagagtcagtgcccgaccctcaaccaatcggagaaccccccgcaggcccctctggtctgggatctggtacaatggctgcaggcggtggcgctccaatggcagacaataacgaaggcgccgacggagtgggtagttcctcaggaaattggcattgcgattccgcatggctgggcgacagagtcatcaccaccagcacccgaccctgggccctccccacctacaacaaccacctctacaagcaaatctccaacgggacatcgggaggaagcaccaacgacaacacctacttcggctacagcaccccctgggggtattttgactttaacagattccactgccacttctcaccacgtgactggcagcgactcatcaacaacaactggggattccggcccaagagactcaacttcaagctcttcaacatccaggtcaaggaggtcacgcagaatgaaggcaccaagaccatcgccaataaccttaccagcacgattcaggtctttacggactcggaataccagctcccgtacgtcctcggctctgcgcaccagggctgcccgcctccgttcccggcggacgtcttcatgattcctcagtacgggtacctgactctgaacaacggcagtcaggccgtgggccgttcctccttctactgcctggagtactttccttctcaaatgcggagaacgggcaacaactttgagttcagctaccagtttgaggacgtgccttttcacagcagctacgcgcatagccaaagcctggaccggctgatgaaccccctcatcgaccagtacctgtactacctgtctcggactcagtccacgggaggtaccgcaggaactcagcagttgctattttctcaggccgggcctaataacatgtcggctcaggccaaaaactggctacccgggccctgctaccggcagcaacgcgtctccacgacactgtcgcaaaataacaacagcaactttgcttggaccggtgccaccaagtatcatctgaatggcagagactctctggtaaatcccggtgtcgctatggcaacgcacaaggacgacgaagagcgattttttccatccagcggagtcttgatgtttgggaaacagggagctggaaaagacaacgtggactatagcagcgttatgctaaccagtgaggaagaaatcaaaaccaccaacccagtggccacagaacagtacggcgtggtggccgataacctgcaacagcaaaacgccgctcctattgtaggggccgtcaacagtcaaggagccttacctggcatggtctggcagaaccgggacgtgtacctgcagggtcctatctgggccaagattcctcacacggacggcaactttcatccttcgccgctgatgggaggctttggactgaaacacccgcctcctcagatcctgattaagaatacacctgttcccgcggatcctccaactaccttcagtcaagccaagctggcgtcgttcatcacgcagtacagcaccggacaggtcagcgtggaaattgaatgggagctgcagaaagagaacagcaagcgctggaacccagagattcagtatacttccaactactacaaatctacaaatgtggactttgctgtcaatactgagggtacttattcagagcctcgccccattggcacccgttacctcacccgtaacctgtaa

SEQ ID NO: 148 - DNA, 2208 bp, Adeno-associated virus
atggctgccgatggttatcttccagattggctcgaggacactctctctgaaggaataagacagtggtggaagctcaaacctggcccaccaccaccaaagcccgcagagcggcataaggacgacagcaggggtcttgtgcttcctgggtacaagtacctcggacccttcaacggactcgacaagggggagccggtcaacgaggcagacgccgcggccctcgagcacgacaaggcctacgaccggcagctcgacagcggagacaacccgtacctcaagtacaaccacgccgacgcggagtttcaggagcgccttaaagaagatacgtcttttgggggcaacctcggacgagcagtcttccaggcaaaaaagagggttcttgaacctctgggcctggttgaggaacctgttaaaacggctccgggaaaaaagaggccggtagagcactctcctgtggagccagactcctcctcgggaaccggaaaagcgggccagcagcctgcaagaaaaagattgaatttcggtcagactggagacgcagactccgtacctgacccccagcctctcggacagccaccagcagccccctctggtctgggatctactacaatggctacaggcagtggcgcaccaatggcagacaataacgagggtgccgatggagtgggtaattcctcgggaaattggcattgcgattcccaatggctgggcgacagagtcatcaccaccagcacccgcacctgggccctgcccacctacaacaaccacctctacaagcaaatctccagccaatcaggagcctcaaacgacaaccactactttggctacagcaccccctgggggtattttgacttcaacagattccactgccacttttcaccacgtgactggcaaagactcatcaacaacaactggggattccgacccaagagactcaacttcaagctctttaacattcaagtcaaagaggtcacgcagaatgacggtacgacgacgattgccaataaccttaccagcacggttcaggtgtttactgactcggagtaccagctcccgtacgtcctcggctcggcgcatcaaggatgcctcccgccgtttccagcggacgtcttcatggtcccacagtatggatacctcaccctgaacaacgggagtcaggcagtaggacgctcttcattttactgcctggagtactttccttctcagatgctgcgtaccggaaacaactttcaattcagctacacttttgaagacgtgcctttccacagcagctacgctcacagccagagtctggatcggctgatgaatcctctggtcgaccagtacctgtattatctgaacaagacacaaacaaatagtggaactcttcagcagtctcggctactgtttagccaagctggacccaccaacatgtctcttcaagctaaaaactggctgcctggaccttgctacagacagcagcgtctgtcaaagcaggcaaacgacaacaacaacagcaactttccctggactgcagctacaaagtatcatctaaatggccgggactcgttggttaatccaggaccagctatggccagtcacaaggatgacgaagaaaagtttttccccatgcatggaacccttatatttggtaaacaaggaacaaatgccaacgacgcggatttggaaaatgtcatgattacagatgaagaagaaatcaggaccaccaatcccgtggctacggagcagtacggaactgtatcaaataatttgcaaaactcaaacactggtccaactactggaactgtcaatcaccaaggagcgttacctggtatggtgtggcaggatcgagacgtgtacctgcagggacccatttgggccaagattcctcacaccgatggacactttcatccttctccactgatgggaggttttggactcaaacacccacctcctcaaatcatgatcaaaaacactcccgttccagccaatcctcccacaaacttcagttctgccaagtttgcttctttcatcacacagtattccacggggcaggtcagcgtggagatcgagtgggagctgcagaaggagaacagcaaacgctggaatcccgaaattcagtacacttccaactacaacaaatctgttaatgtggactttactgtggacactaatggtgtgtattcagagcctcgccccattggcaccagatacctgactcgtaatctgtaa

SEQ ID NO: 149 - DNA, 2208 bp, Adeno-associated virus
atggctgccgatggttatcttccagattggctcgaggacactctctctgaaggaataagacagtggtggaagctcaaacctggcccaccaccaccaaagcccgcagagcggcataaggacgacagcaggggtcttgtgcttcctgggtacaagtacctcggacccttcaacggactcgacaagggggagccggtcaacgaggcagacgccgcggccctcgagcacgacaaggcctacgaccggcagctcgacagcggagacaacccgtacctcaagtacaaccacgccgacgcggagtttcaggagcgccttaaagaagatacgtcttttgggggcaacctcggacgagcagtcttccaggcaaaaaagagggttcttgaacctctgggcctggttgaggaacctgttaaaacggctccgggaaaaaagaggccggtagagcaccctcctgtggagccagactcctcctcgggaaccggaaaagcgggccagcagcctgcaagaaaaagattgaatttcggtcagactggagacgcagactccgtacctgacccccagcctctcggacagccaccagcagccccctctggtctgggatctactacaatggctacaggcagtggcgcaccaatggcagacaataacgagggtgccgatggagtgggtaattcctcgggaaattggcattgcgattcccaatggctgggcgacagagtcatcaccaccagcacccgcacctgggccctgcccacctacaacaaccacctctacaagcaaatctccagccaatcaggagcctcaaacgacaaccactactttggctacagcaccccctgggggtattttgacttcaacagattccactgccacttttcaccacgtgactggcaaagactcatcaacaacaactggggattccgacccaagagactcaacttcaagctctttaacattcaagtcaaagaggtcacgcagaatgacggtacgacgacgattgccaataaccttaccagcacggttcaggtgtttactgactcggagtaccagctcccgtacgtcctcggctcggcgcatcaaggatgcctcccgccgtttccagcggacgtcttcatggtcccacagtatggatacctcaccctgaacaacgggagtcaggcagtaggacgctcttcattttactgcctggagtactttccttctcagatgctgcgtaccggaaacaactttcagttcagctacacttttgaagacgtgcctttccacagcagctacgctcacagccagagtctggatcggctgatgaatcctctgatcgaccagtacctgtattatctgaacaagacacaaacaaatagtggaactcttcagcagtctcggctactgtttagccaagctggacccaccaacatgtctcttcaagctaaaaaccggctgcctggaccttgctacagacagcagcgtctgtcaaagcaggcaaacgacaacaacaacagcaactttccctggaccgcagctacaaagtatcatctaaatggccgggactcgttggttaatccaggaccagctatggccagtcacaaggatgacgaagaaaagtttttccccatgcatggaacccttatatttggtaaacaaggaacaaatgccaacgacgcggatttggaaaatgtcatgattacagatgaagaagaaatcaggaccaccaatcccgtggctacggagcagtacggaactgtatcaaataatttgcaaaactcaaacactggtccaactactggaactgtcaatcaccaaggagcgttacctggtatggtgtggcaggatcgagacgtgtacctgcagggacccatttgggccaagattcctcacaccgatggacactttcatccttctccactggtgggaggttttggactcaaacacccacctcctcaaatcatgatcaaaaacactcccgttccagccaatcctcccacaaacttcagttctgccaagtttgcttctttcatcacacagtattccacggggcaggtcagcgtggagatcgagtgggagctgcagaaggagaacagcaaacgctggaatcccgaaattcagtacacttccaactacaacaaatctgttaatgtggactttactgtggacactaatggtgtgtattcagagcctcgccccattggcaccagatacctgactcgtaatctgtaa

SEQ ID NO: 150 - DNA, 2208 bp, Adeno-associated virus
atggctgccgatggttatcttccagattggctcgaggacactctctctgaaggaataagacagtggtggaagctcaaacctggcccaccaccaccaaagcccgcagagcggcataaggacgacagcaggggtcttgtgcttcctgggtacaagtaccttggacccttcaacggactcgacaagggagagccggtcaacgaggcagacgccgcggccctcgagcacgacaaggcctacgaccggcagctcgacagcggagacaacccgtaccccaagtacaaccacgccgacgcggagttccaggagcgtcttaaagaagatacgtcttttgggggcaacctcggacgagcagtcttccaggcgaaaaagagggttcttgaacctctgggcctggttgaggaacctgttaagacggctccgggaaaaaagaggccggtagagcactctcctgcggagccagactcctcctcgggaaccggaaaagcgggccagcagcctgcaagaaagagattgaatttcggtcagactggagacgcagactccgtacctgacccccagcctctcggacagccaccagcagccccctctggtctgggaactaatacgatggctacaggcagtggcgcaccaatggcagacaataacgagggcgccgacggagtgggtaattcctcgggaaattggcattgcgattccacatggatgggcgacagagtcatcaccaccagcacccgcacctgggctctgcccacctacaacaaccacctctacaagcagatttccagccaatcaggagcctcaaacgacaaccactactttggctacagcaccccttgggggtattttgacttcaacagattccactgccacttttcgccacgtgactggcaaagactcatcaacaacaattggggattccggcccaaaagactcaacttcaagctctttaacattcaagtcaaggaggtcacgcagaatgacggtacgacgacgattgccaataaccttaccagcacggttcaggtgtttactgactcggagtaccagctcccgtacgtcctcggctcggcgcatcaaggatgcctcccgccgttcccagcagacgtcttcatggtgccacagtatggatacctcaccctgaacaacgggagtcaggcagtaggacgctcttcattttactgcctggagtactttccttctcagatgctgcgtaccggaaacaactttaccttcagctacacctttgaggacgttcctttccacagcagctacgcccacagccagagtttggaccgtctcatgaatcctctcatcgaccagtacctgtattacttgagcagaacaaacactccaagcggaaccaccacgcagtcaaggcttcagttttctcaggccggagcaagtgacattcgggaccagtctaggaactggcttcctggaccctgttaccgccagcagcgagtatcaaagacatctgcggataacaacaacagtgaatactcgtggactggagctaccaagtaccaccttaatggaagagactctctggtgaatccgggcccggccatggccagccacaaggacgatgaagaaaagttttttcctcagagcggggttctcatctttggaaaacaagactcgggaaaaactaatgtggacattgaaaaggtcatgattacagacgaagaggaaatcaggaccaccaatcccgtggctacggagcagtatggttctgtatctaccaacctccagagcggcaacacacaagcagctacctcagatgtcaacacacaaggcgttcttccaggcatggtgtggcaggacagagacgtgtacctgcaggggcccatctgggcaaagattccacacacggacggacattttcacccctctcccctcatgggcggattcggacttaaacaccctcccccgcagattctcatcaagaacaccccggtacctgcgaatccttcgactaccttcagtgcggcaaagtttgcttccttcattacacagtactccacggggcaggtcagcgtggagatcgagtgggagctgcagaaggagaacagcaaacgctggaatcccgagattcagtacacttccaactacaacaaatctgttaatgtggactttactgtggacactaatggtgtgtattcagagcctcgccccattggcaccaggtacctgactcgtaatctgtaa

SEQ ID NO: 151 - DNA, 2208 bp, Adeno-associated virus
atggctgccgatggttatcttccagattggctcgaggacactctctctgaaggaataagacagtggtggaagctcaaacctggcccaccaccaccaaagcccgcagagcggcataaggacgacagcaggggtcttgtgcttcctgggtacaagtaccttggacccttcaacggactcgacaagggagagccggtcaacgaggcagacgccgcggccctcgagcacgacaaggcctacgaccggcagctcgacggcggagacaacccgtacctcaagtacaaccacgccgacgcggagttccaggagcgtcttaaagaagatacgtcttttgggggcaacctcggacgagcagtcttccaggcgaaaaagagggttcttgaacctctgggcctggttgaggaacctgttaagacggctccgggaaaaaagaggccggtagagcactctcttgcggagccagactcctcctcgggaaccggaaaagcgggccagcagcctgcaagaaggagattgaatttcggtcagactggagacgcagactccgtacctgacccccagcctctcggacagccaccagcagccccctctggtctgggaactaatacgatggctacaggcagtggcgcaccaatggcagacaataacgagggcgccgacggagtgggtaattcctcgggaaattggcattgcgattccacatggatgggcgacagagtcatcaccaccagcacccgcacctgggctctgcccacctacaacaaccacctctacaggcagatttccagccaatcaggagcctcaaacgacaaccactactttggctacagcaccccttgggggtattttgacttcaacagattccactgccacttttcgccacgtgactggcaaagactcatcaacaacaattggggatcccggcccaaaagactcaacttcaagctctttaacattcaagtcaaggaggtcacgcagaatgacggtacgacgacgattgccaataaccttaccagcacggttcaggtgtttactgactcggagtaccagctcccgtacgtcctcggctcggcgcatcaaggatgcctcccgccgttcccagcagacgtcttcatggtgccacagtatggatacctcaccctgaacaacgggagtcaggcagtaggacgctcttcattttactgcctggagtactttccttctcagatgctgcgtaccggaaacaactttaccttcagctacacctttgaggacgttcctttccacagcagctacgcccacagccagagtttggaccgtctcatgaatcctctcgtcgaccagtacctgtattacttgagcagaacaaacactccaagcggaaccaccacgcagtcaaggcttcagttttctcaggccggagcaagtgacattcgggaccagtctaggaactggcttcctggaccctgttaccgccagcagcgagtatcaaagacatctgcggataacaacaacagtgaatactcgtggactggagctaccaagtaccaccttaatggaagagactctctggtgaatccgggcccggccatggccagccacaaggacgatgaagaaaagttttttcctcagagcggggttctcatctttggaaaacaagactcgggaaaaactaatgtggacattgaaaaggtcatgattacagacgaagaggaaatcaggaccaccaatcccgtggctacggagcagtatggttctgtatctaccaacctccagagcggcaacacacaagcagctacctcagatgtcaacacacaaggcgttcttccaggcatggtgtggcaggacagagacgtgtacctgcaggggcccatctgggcaaagattccacacacggacggacattttcacccctctcccctcatgggcggattcggacttaaacaccctcccccgcagattctcatcaagaacaccccggtacctgcgaatccttcgactaccttcagtgcggcaaagtttgcttccttcattacacagtactccacggggcaggtcagcgtggagatcgagtgggagctgcagaaggagaacagcaaacgctggaatcccgagattcagtacacttccaactacaacaaatctgttaatgtggactttactgtggacactaatggtgtgtattcagagcctcgccccattggcaccagatacctgactcgtaatctgtaa

SEQ ID NO: 152 - DNA, 2217 bp, Adeno-associated virus
atggctgctgacggttatcttccagattggctcgaggacaacctctctgagggcattcgcgagtggtgggacctgaaacctggagcccccaagcccaaggccaaccagcagaagcaggacgacggccggggtctggtgcttcctggctacaagtacctcggacccttcaacggactcgacaagggggagcccgtcaacgcggcggacgcagcggccctcgagcacgacaaggcctacgaccagcagctcaaagcgggtgacaatccgtacctgcggtataaccacgccgacgccgagtttcaggagcgtctgcaagaagatacgtcttttgggggcaacctcgggcgagcagtcttccaggccaagaagcgggttctcgaacctctcggtctggttgaggaagctgctaagacggctcctggaaagaagagaccggtagaaccgtcacctcagcgttcccccgactcctccgcgggcatcggcaagaaaggccagcagcccgctaaaaagagactgaactttggtcagactggcgactcagagtcagtccccgaccctcaaccaatcggagaaccaccagcaggcccctctggtctgggatctggtacaatggctgcaggcggtggcgctccaatggcagacaataacgaaggcgccgacggagtgggtagttcctcaggaaattggcattgcgattccacatggctgggcgacagagtcatcaccaccagcacccgaacctgggccctgcccacctacaacaaccacctctacaagcaaatatccaatgggacatcgggaggaagcaccaacgacaacacctacttcggctacagcaccccctgggggtattttgacttcaacagattccactgccacttctcaccacgtgactggcagcgactcatcaacaacaactggggattccggccaaaaagactcagcttcaagctcttcaacatccaggtcaaggaggtcacgcagaatgaaggcaccgagaccatcgccaataaccttaccagcacgattcaggtatttacggactcggaataccagctgccgtacgtcctcggctccgcgcaccagggctgcctgcctccgttcccggcggacgtcttcatgattccccagtacggctaccttacactgaacaatggaagtcaagccgtaggccgttcctccttctactgcctggaatattttccatctcaaatgctgcgaactggaaacaattttgaattcagctacaccttcgaggacgtgcctttccacagcagctgcgcacacagccagagctcggaccgactgatgaatcctctcatcgaccagtacctgtactacttatccagaactcggtccacaggaggaactcaaggtacccagcaattgttattttctcaagctgggcctgcaaacatgtcggctcaggctaagaactggctacctggaccttgctaccggcagcagcgagtctctacgacactgtcgcaaaacaacaacagcaactttgcttggactggtgccaccaaatatcacctgaacggaagagactctttggtaaatcccggtgtcgccatggcaacccacaaggacgacgaggaacgcttcttcccgtcgagtggagtcctgatgtttggaaaacagggtgctggaagagacaatgtggactacagcagcgttatgctaaccagcgaagaagaaattaaaaccactaaccctgtagccacagaacaatacggtgtggtggctgacaacttgcagcaaaccaatacagggcctattgtgggaaatgtcaacagccaaggagccttacctggcatggtctggcagaaccgagacgtgtacctgcagggtcccatctgggccaagattcctcacacggacggcaacttccacccttcaccgctaatgggaggatttggactgaagcacccacctcctcagatcctgatcaagaacacgccggtacctgcggatcctccaacaacgttcagccaggcgaaattggcttccttcattacgcagtacagcaccggacaggtcagcgtggaaatcgagtgggagctgcagaaggagaacagcaaacgctggaacccagagattcagtacacttcaaactactacaaatctacaaatgtggactttgctgtcaatacagagggaacttattctgagcctcgccccattggtactcgttacctcacccgtaatctgtaa

SEQ ID NO: 153 - DNA, 2217 bp, Adeno-associated virus
atggctgctgacggttatcttccagattggctcgaggacaacctctctgagggcattcgcgagtggtgggacctgaaacctggagcccccaagcccaaggccaaccagcagaagcaggacgacggccggggtctggtgcttcttggctacaagtacctcggacccttcaacggactcgacaagggggagcccgtcaatgcggcggacgcagcggccctcgagcacgacaaggcctacgaccagcagctcaaagcgggtgacaatccgtacctgcggtataaccacgccgacgccgagtttcaggagcgtctgcaagaagatacgtcttttgggggcaacctcgggcgagcagtcttccaggccaagaagcgggttctcgaacctctcggtctggttgaggaagctgctaagacggctcctggaaagaagagaccggtagaaccgtcacctcagcgttcccccgactcctccacgggcatcggcaagaaaggccagcagcccgctaaaaagagactgaactttggtcagactggcgactcagagtcagtccccgaccctcaaccaatcggagaaccaccagcaggcccctctggtctgggatctggtacaatggctgcaggcggtggcgctccaatggcagacaataacgaaggcgccgacggagtgggtagttcctcaggaaattggcattgcgattccacatggctgggcgacagagtcatcaccaccagcacccgaacctgggccctgcccacctacaacaaccacctctacaagcaaatatccaatgggacatcgggaggaagcaccaacgacaacacctacttcggctacagcaccccctgggggtattttgacttcaacagattccactgccacttctcaccacgtgactggcagcgactcatcaacaacaactggggattccggccaaaaagactcagcttcaagctcttcaacatccaggtcaaggaggtcacgcagaatgaaggcaccaagaccatcgccaataaccttaccagcacgattcaggtatttacggactcggaataccagctgccgtacgtcctcggctccgcgcaccagggctgcctgcctccgttcccggcggacgtcttcatgattccccagtacggctaccttacactgaacaatggaagtcaagccgtaggccgttcctccttctactgcctggaatattttccatctcaaatgctgcgaactggaaacaattttgaattcagctacaccttcgaggacgtgcctttccacagcggctacgcacacagccagagcttggaccgactgatgaatcctctcatcgaccagtacctgtactacttatccagaactcagtccacaggaggaactcaaggtacccagcaattgttattttctcaagctgggcctgcaaacatgtcggctcaggctaagaactggctacctggaccttgctaccggcagcagcgagtctctacgacactgtcgcaaaacaacaacagcaactttgcttggactggtgccaccaaatatcacctgaacggaagagactctttggtaaatcccggtgtcgccatggcaacccacaaggacgacgaggaacgcttcttcccgtcgagtggagtcctgatgtttggaaaacagggtgctggaagagacaatgtggactacagcagcgttatgctaaccagcgaagaagaaattaaaaccactaaccctgtagccacagaacaatacggtgtggtggctgacaacttgcagcaaaccaatacagggcctattgtgggaaatgtcaacagccaaggagccttacctggcatggtctggcagaaccgagacgtgtacctgcagggtcccatctgggccaagattcctcacacggacggcaacttccacccttcaccgctaatgggaggatttggactgaagcacccacctcctcagatcctgatcaagaacacgccggtacctgcggatcctccaacgacgttcagccaggcgaaattggcttccttcattacgcagtacagcaccggacaggtcagcgtggaaatcgagtgggagctgcagaaggagaacagcaaacgctggaacccagagattcagtacacttcaaactactacaaatctacaaatgtggactttgctgtcaatacagagggaacttattctgagcctcgccccattggtactcgttacctcacccgtaatctgtaa

SEQ ID NO: 154 - DNA, 2208 bp, Adeno-associated virus
atggctgccgatggttatcttccagattggctcgaggacactctctctgaaggaataagacagtggtggaagctcaaacctggcccaccaccaccaaagcccgcagagcggcataaggacgacagcaggggtcttgtgcttcctgggtacaagtacctcggacccttcaacggactcgacaagggggagccggtcaacgaggcagacgccgcggccctcgagcacgacaaggcctacgaccggcagctcgacagcggagacaacccgtacctcaagtacaaccacgccgacgcggagtttcaggagcgtcttaaagaagatacgtcttttgggggcaacctcggacgagcagtcttccaggcgaaaaagagggttcttgaacctctgggcctggttgagggacctgttaagacggctccgggaaaaaagaggccggtagagcactctcctgcggagccagactcctcctcgggaaccggaaaagcgggccagcagcctgcaagaaaaagattgaattttggtcagactggagacgcagactccgtacctgacccccagcctctcggacagccaccagcagccccctctggtttgggatctactacaatggctacaggcagtggcgcaccaatggcagacaataacgagggtgccgatggagtgggtaattcctcaggaaattggcattgcgattcccaatggctgggcgacagagtcatcaccaccagcacccgaacctgggccctgcccacctacaacaaccacctctacaagcaaatctcaagccaatcaggagcctcaaacgacaaccactactttggctacagcaccccttgggggtattttgacttcaacagattccactgccacttttcaccacgtgactggcaaagactcatcaacaacaactggggattccgacccaagagactcaacttcaagctctttaacattcaagtcaaagaggtcacgcagaatgacggtacgacgacgattgccaataaccttaccagcacggttcaggtgtttactgactcggagtaccagctcccgtacgtcctcgggtcggcgcatcaaggatgcctcccgccgtttccagcggacgtcttcatggtcccacagtatggatacctcaccctgaacaacgggagtcaggcggtaggacgctcttccttttactgcctggagtactttccttctcagatgcttcgtactggaaacaactttcagttcagctacacctttgaagacgttcctttccacagcagctacgctcacagccagagtctggatcggctgatgaatcctctgatcgaccagtacctgtattatctgaacaaaacacaatcaaatagtggaactcttcagcagtctcggctactgtttagtcaagctggacccaccagcatgtctcttcaagctaaaaactggctacctggaccttgctacagacagcagcgtctgtcaaagcaggcaaacgacaacaacaacagcaactttccctggactgcggctacaaagtatcacctaaatggccgggactcgttggttaatccaggaccagctatggccagtcacaaagacgatgaagaaaagtttttccccatgcatggaaccctgatatttggtaaacaaggaacaaatgctaacgacgcggatttggacaatgtcatgattacagatgaagaagaaatccgcaccaccaatcccgtggctacggagcagtacggatatgtgtcaaataatttgcaaaactcaaatactggtccaactactggaactgtcaatcaccaaggagcgttacctggcatggtgtggcaggatcgagacgtgtacctgcagggacccatttgggccaagattcctcacaccgatggacactttcatccttctccactgatgggaggttttgggctcaaacacccgcctcctcagatcatgatcaaaaacactcccgttccagccaatcctcccacaaacttcagttctgccaagtttgcttctttcatcacacagtattccacggggcaggtcagcgtggagatcgagtgggagctgcagaaagagaacagcaaacgctggaatcccgaaattcagtacacttccaactacaacaaatctgttaatgtggactttactgtggacactaatggcgtgtattcagagcctcgccccattggcaccagatacctgactcgtaatctgtaa

SEQ ID NO: 155 - DNA, 2208 bp, Adeno-associated virus
atggctgccgatggttatcttccagattggctcgaggacactctctctgaaggaataagacagtggtggaagctcaaacctggcccaccaccaccaaagcccgcagagcggcatcaggacaacagcaggggtcttgtgcttcctgggtacaagtacctcggaccctccaacggactcgacaaaggagagccggtcaacgaggcagacgccgcggccctcgagcacgacaaggcctacgaccggcagctcgacagcggagacaacccgtacctcaagtacaaccacgccgacgcggagtttcaggagcgtcttaaagaagatacgtcttttgggggcaacctcggacgagcagtcttccaggcgaaaaagagggttcttgaacctctgggcctggttgaggaacctgttaagacggctccgggaaaaaagaggccggtagagcactctcctgtggagccagactcctcctcgggaaccggaaaagcgggccatcagcctgcgagaaagagattgaattttggtcagactggagacgcagactccgtacctgacccccagcctctcggacagccaccagcagcccccacaagtttgggatctactacaatggctacaggcagtggcgcaccaatggcagacaataacgagggtgccgatggagtgggtaattcctcaggaaattggcattgcgattcccaatggctgggcgacagagtcatcaccaccagcacccgaacctgggccctgcccacctacaacaaccacctctacaagcaaatctccagccaatcaggagcctcgaacgacaaccactactttggctgcagcaccccctgggggtattttgacttcaacagattccactgtcacttctccccacgtgattggcaaagactcatcaacaacaactggggattccgacccaagagactcaacttcaagctctttaacattcaagtcaaagaggtcacgcagaatgacggtacgacgacgattgccaataaccttaccagcacggttcaggtgtttactgactcggagtacccgctcccgtacgtcctcggctcggcgcatcaaggatgcctcccgccgtttccagcggacgtcttcatggtcccacagtatggatacctcaccctgaacaacgggagtcaggcggtaggacgctcttccttttactgcctggagtactttccttctcagatgctgcgtaccggaaacaactttaccttcagctacacctttgaggacgttcctttccacagcagctacgctcacagccagagtttggaccggctgatgaatcctctgatcgaccagtatctatattatctgaacaggacacaatcaaatagtggaactcttcagcagtctaggctactgtttagccaagctggacccaccagcatgtctcttcaagctaaaaactggctgcctggaccttgctacagacagcagcgtctttcaaagcaggcaaacgacaacaacaacagcaactttccctggactgcggctacaaagtatcatctaaatggccgggactcgttggttaatccaggaccagctatggccagccacaaagacgatgaagaaaagtttttccccatgcatggaaccctgatatttggtaaacaaggaacaaatgctaacgacgcggatttggagcatgttatgattacagatgaagaagaaatcaggaccaccaatcctgtggctacagagcagtacggaaacgtgtcaaataatttgcaaaactcaaatactggtccaactacagaaaatgtcaatcaccagggagcgttacctggtatggtgtggcaggatcgagacgtgtacctgcagggacccatttgggccaagattcctcacaccgacggacactttcacccttctccactgatgggaggttttggactcaaacacccgcctcctcaaatcatgatcaaaaacactcccgttccagccaatcctcccacaaacttcagttctgccaagtttgcttctttcatcacacagtattccacgggccaggtcagcgtggagattgagtgggagctgcagaaggagaacagcaaacgctggaaccccgagatccagtatacttccaactacaacaaatctgttaatgtggactttactgtggacactaatggtgtgtattcagagccttgccccattggcaccagatacctgactcgtaatctgtaa

SEQ ID NO: 156 - DNA, 2208 bp, Adeno-associated virus
atggctgccgatggttatcttccagattggctcgaggacactctctctgaaggaataagacagtggtggaagctcaaacctggcccaccaccgccaaagcccgcagagcggcataaggacgacagcaggggtcttgtgcttcctgggtacaagtacctcggacccttcaacggactcgacaagggagagccggtcaacgaggcagacgccgcggccctcgagcacgacaaggcctacgaccggcagctcgacagcggagacaacccgtacctcaagtacaaccacgccgacgcggagtttcaggagcgtcttaaagaagatacgtcttttgggggcaacctcggacgagcagtcttccaggccaaaaagaggattcttgaacctctgggcctggttgaggagcctgttaagacggctccgggaaaaaagaggccggtagagcactctcctgcggagccagattcctcctccggaactggaaagtcgggccaacagcctgcaagaaagagattgaatttcggtcagactggagacgcagactccgtacctgacccccagcctctcggacagccaccagcagccccctctggtctgggaactaatacgatggcttcaggcagtggcgcaccaatggcagacaataacgagggcgccgacggagtgggtaattcctcgggaaattggcattgcgattccacatggatgggcgacagagtcatcaccaccagcacccgcacctgggctctgcccacctacaacaaccatctgtacaagcagatttccagccagtctggagccagcaacgacaaccactactttggctacagcaccccctgggggtattttgacttcaacagattccactgccacttctccccacgtgactggcaaagactcatcaacaacaactggggattccggcccaagagactcagcttcaagctctttaacattcaagtcaaggaggtcacgcagaatgacggtacgacgacgattgccaataaccttaccagcacggttcaggtgtttactgactcggagtaccagctcccgtacgtcctcggctcggcgcatcaaggatgcctcccgccgttcccagcagacgtcttcatggtgccacagtatggatacctcaccctgaacaacggcagtcaggcggtaggacgctcttccttttactgcctggagtactttccttctcagatgctgcgtactggaaacaactttaccttcagctacacctttgaagacgttcctttccacagcagctacgctcacagccaaagtctggaccgtctcatgaatcctctcatcgaccagtacctgtattacttgagcagaacaaacacgccaagcggaaccaccacgatgtccaggcttcagttttctcaggccggagcaagtgacattcgggaccagtctagaaactggcttcctggaccctgttaccgccagcagcgagtatcaaagacagctgcggacaacaacaacagtgattactcgtggactggagctaccaagtaccacctcaatggaagagactctctggtgaatccgggcccagctatggccagccacaaggacgatgaagaaaaatattttcctcagagcggggttctcatctttggaaaacaagactcgggaaaaactaatgtggacattgaaaaggttatgattacagacgaagaggaaatcaggaccaccaatcccgtggctacggagcagtatggttctgtatctaccaacctccagagcggcaacacacaagcagctacctcagatgtcaacacacaaggcgttcttcctggcatggtctggcaggacagagacgtgtacctgcaggggcccatttgggcaaagattccccacacggatggacactttcacccttctcctcttatgggaggatttggactgaagcaccctcccccgcagattctcatcaagaataccccggtacctgcaaatccttcgaccaccttcagtgcggcaaagtttgcttctttcatcacacagtactccacggggcaggtcagcgtggagatagagtgggagctgcagaaggagaacagcaaacgctggaatcccgagatccagtatacttccaactataacaaatctgttaatgtggactttactgtggacactaatggtgtgtattcagagcctcgccccattggcaccagatacctgactcgtaatctgtaa

SEQ ID NO: 157 - DNA, 2208 bp, Adeno-associated virus
atggctgccgatggttatcttccagattggctcgaggacactctctctgaaggaataagacagtggtggaagctcaaacctggcccaccaccaccaaagcccgcagagcggcacaaggacgacagcaggggtcttgtgcttcctgggtacaagtacctcggacccttcaacggactcgacaagggagagccggtcaacgaggcagacgccgcggccctcgagcacgacaaggcctacgaccggcagctcgacagcggagacaacccgtacctcaagtacaaccacgccgacgcgaagtttcaggagcgtcttaaagaagatacgtcttttgggggcaacctcggacgagcagtcttccaggccaaaaagaggattcttgaacctctgggcctggttgaggagcctgttaagacggctccgggaaaaaagaggccggtagagcactctcctgcggagccagattcctcctccggaactggaaagtcgggccaacagcctgcaagaaagagattgaatttcggtcagactggagacgcagactccgtacctgacccccagcctctcggacagccaccagcagccccctctggtctgggaactaatacgatggcttcaggcagtggcgcaccaatggcagacaataacgagggcgccgacggagtgggtaattcctcgggaaattggcattgcgattccacatggatgggcgacagagtcatcaccaccagcacccgcacctgggctctgcccacctacaacaaccatctgtacaagcagatttccagccagtctggagccagcaacgacaaccactactttggctacagcaccccctgggggtattttgacttcaacagattccactgccacttctccccacgtgactggcaaagactcatcaacaacaactggggattccggcccaagagactcggcttcaagctctttaacattcaagtcaaggaggtcacgcagaatgacggtacgacgacgattgccaataaccttaccagcacggttcaggtgtttactgactcggagtaccagctcccgtacgtcctcggctcggcgcatcaaggatgcctcccgccgttcccagcagacgtcttcatggtgccacagtatggatacctcaccctgaacaacggcagtcaggcggtaggacgctcttccttttactgcctggagtactttccttctcagatgctgcgtactggaaacaactttaccttcagctacacctttgaagacgttcctttccacagcagctacgctcacagccaaagtctggaccgtctcatgaatcctctcatcgaccagtacctgtattacttgagcagaacaaacacgccaagcggaaccaccacgatgtccaggcttcagttttctcaggccggagcaagtgacattcgggaccagtctagaaactggcttcctggaccctgttaccgccagcagcgagtatcaaagacagctgcggacaacaacaacagtgattactcgtggactggagctaccaagtaccacctcaatggaagagactctctggtgaatccgggcccagctatggccagccacaaggacgatgaagaaaaatattttcctcagagcggggttctcatctttggaaaacaagactcgggaaaaactaatgtggacactgaaaaggtcatgattacagacgaagaggaaatcaggaccaccaatcccgtggctacggagcagtacggtgctgtatctaccaaccttcaaagcggcaacacacaagcagctacctcagatgtcaacacacaaggcgttcttcctggcatggtctggcaggacagagacgtgtacctgcaggggcccatctgggcaaagattccccacacggatggacactttcacccttctcctcttatgggaggatttggactgaagcaccctcccccgcagattctcatcaagaataccccggtacctgcgaatccttctaccaccttcagtgcggcaaagtttgcttctttcatcacacagtactccacggggcaggtcagcgtggagatcgagtgggagctgcagaaagaaaacagcaaacgctggaaccccgagatccagtacacttccaactacaacaagtctgttaatgtggactttactgtggacactaatggcgtgtattcagagcctcgccccattggcacaagatacctgactcgtaatctgtaa

SEQ ID NO: 158 - DNA, 2208 bp, Adeno-associated virus
atggctgccgatggttatcttccagattggctcgaggacactctctctgaaggaataagacagtggtggaagctcaaacctggcccaccaccaccaaagcccgcagagcggcacaaggacgacagcaggggtcttgtgcttcctgggtacaagtacctcggacccttcaacggactcgacaagggagagccggtcaacgaggcagacgccgcggccctcgagcacgacaaggcctacgaccggcagctcgacagcggagacaacccgtacctcaagtacaaccacgccgacgcggagtttcaggagcgtcttaaagaagatacgtcttttgggggcaacctcggacgagcagtcttccaggccaaaaagaggattcttgaacctctgggcctggttgaggagcctgttaagacggctccgggaaaaaagaggccggtagagcactctcctgtggagccagactcctcctccggaactggaaagtcgggccaacagcctgcaagaaagagattgaattttggtcagactggagacgcagactccgtacctgacccccagcctctcggacagccaccagcagccccctctggtctgggaactaatacgatggcttcaggcagtggcgcaccaatggcagacaataacgagggcgccgacggagtgggtaattcctcgggaaattggcattgcgattccacatggatgggcgacagagtcatcaccaccagcacccgaacctgggctctgcccacctacaacaaccatctgtacaagcagatttccagccagtctggagccagcaacgacaaccactactttggctacagcaccccctgggggtattttgacttcaacagattccactgccacttctccccacgtgactggcaaagactcatcaacaacaactggggattccggcccaagagactcagcttcaagctctttaacattcaagtcaaggaggtcacgcagaatgacggtacgacgacgattgccaataaccttaccagcacggttcaggtgtttactgactcggagtaccagctcccgtacgtcctcggctcggcgcatcaaggatgcctcccgccgttcccagcagacgtcttcatggtgccacagtatggatacctcaccctgaacaacgggagtcaggcagtaggacgctcttcattttactgcctggagtactttccttctcagatgctgcgtaccggaaacaactttaccttcagctacacctttgaggacgttcctttccacagcagctacgctcacagccaaagtctggaccgtctcatgaatcctctcatcgaccagtacctgtattacttgagcagaacaaacacgccaagcggaaccaccacgatgtccaggcttcagttttctcaggccggagcaagtgacattcgggaccagtctagaaactggcttcctggaccctgttaccgccagcagcgagtatcaaagacagctgcggacaacaacaacagtgattactcgtggactggagctaccaagtaccaccttaatggaagagactctctggtgaatccgggcccagctatggccagccacaaggacgatgaagaaaaatattttcctcagagcggggttctcatctttggaaaacaagactcgggaaaaactaatgtggacattgaaaaggttatgattacagacgaagaggaaatcaggaccaccaatcccgtggctacggagcagtatggttctgtatctaccaacctccagagcggcaacacacaagcagctaccgcagatgtcaacacacaaggcgttcttcctggcatggtctggcaggatagagacgtgtacctgcaggggcccatctgggcaaagattccacacacagacggacattttcacccctctcccctcatgggcggatttggacttaaacaccctcctccacagattctcatcaagaataccccggtacctgcgaatccttcgaccacctttagtgcggcaaagtttgcttctttcatcacacagtattccacgggacaggtcagcgtggagatagagtgggagctgcagaaggagaacagcaaacgctggaatcccgagatccagtatacctctaactacaacaagtctgttaatgtggactttactgtggacactaatggcgtgtattcagagcctcgccccattggcaccagatacctgactcgtaatctgtaa

SEQ ID NO: 159 - DNA, 2181 bp, Adeno-associated virus
atgtcgtttgttgatcaccctccagattggttagaagaagttggtgaaggccttcacgagtttttggagctcgaagctggcccacccaaaccgaagcccaaccagcagaagcaggacaacgcccgtggtcttgtactgcctggatataattatctgggacccttcaacggactcgacaagggagagcccgtcaaccgagcggacgctgttgcgcgagagcacgacatctcgtacaacgagcagctccaggcgggagacaacccctacctcaagtacaaccacgcggacgccgagtttcaggagaagctcaaggacgacacctcctttgggggcaacctcggaaaggcaatctttcaggccaagaaaagggttctcgaaccttttggcctggttgaggcacctgttaagacggctccagccaagaagcggccgatagagaagtctccggcggaaccgagctcttcgaagggcatcggcaaggcgggccagcagcctgcgaggaagcgactcaactttggtcagactggagacaccgactccgccgctgacccccagcctctcggagaaccaccagcagccccctctggtctgggaactggtacgatggcttcaggcagtggcgcaccaatggcagacaataacgaaggcgccgacggagtgggtaatgcctcgggaaattggcattgcgattccacatggctgggcgaccgagtcatcaccaccagcacccgcacctgggccctgcccacctacaacaaccatctctacaagcaaatctccagccagtctggagccaacaacgacaaccactactttggctacagcaccccctgggggtactttgacttcaaccgcttccactgccacttctccccgcgagactggcagcggctcatcaacaacaactgggggttccggcccaagcgactcaacttcaagctcttcaacatccaagtcaaggaggtcactcagacggacggcacgaagaccatcgccaataaccttaccagcacggttcaggtctttgcggactcggagtaccagctcccatacgtcctcggatcggcgcaccagggctgcttcccaccgttcccggcggacgtctttatggtcccgcaatacgggtacttgacgctgaacaacggcagccaggccatgggccgctcttccttctactgcctggagtactttccatcgcagatgctgcgaacagggaacaacttcacgttcagctacaccttcgaggacgtgcccttccacagcagctacgcccacagccagagcctggaccggctcatgaatcctctcatcgaccagtatctatactacttgagcaagacacagaacggcttgggcttttctcaggcgggacacaacagcatgcgggatcagtctaggaactggctgccggggccttgcttcagacagcagcgaatatcgaaaacacctacgcaaaataatactggagactttgcgtggacaggaactacaagatatcacctcaacggcagaaactcggcgatgaatccgggtccggccatggccagccacaaggatgacgaggaaagattctttcctcaaaatggtgtactcatctttggaaaagaagatgcagaaaaaaacaatgcggtgcttgacaaagtgatcatcactgacgaggaggaaatcagaaccacgaaccctgtggccacgggagaatacgggctcgttgctaccaacttccaaaacaatacaacagcagcagatacagagatggtcaacgcacagggcatcctacccggcatggtgtggcaagaccgagatgtgtatctgcagggacccatctgggctaagattccccacacggacggacactttcatccctcgccgctcatgggcgggttcggcctcaagcgcccgcctccgcaaatcctcattaagaacactcccgtaccagcggatcccgccacgaccttcaacccggcgaagctagcgtccttcatcacgcagtactccacgggccaggtcagcgtggaaatcgagtgggagcttcagaaggagaacagcaagcgctggaaccccgaggtccagtacacgtccaactacaacaagtccgtcaacgtggaatttacagtggacaacaacggcgtgtattcggaaccgcgcaccatcggcacccgctaccttactcgtaatctgtaa

SEQ ID NO: 160 - DNA, 2181 bp, Adeno-associated virus
atgtcgtttgttgatcaccctccagattggttagaagaagttggtgaaggccttcacgagtttttggagctcgaagctggcccacccaaaccgaagcccaaccagcagaagcaggacaacgcccgtggtcttgtactgcctggatataattatctgggacccttcaacggactcgacaagggagagcccgtcaaccgagcggacgctgttgcgcgagagcacgacatctcgtacaacgagcagctccaggcgggagacaacccctacctcaagtacaaccacgcggacgccgagtttcaggagaagctcaaggacgacacctcctttgggggcaacctcggaaaggcaatctttcaggccaagaaaagggttctcgaaccttttggcctggttgaggcacctgttaagacggctccagccaagaagcggccgatagagaagtctccggcggaaccgagctcttcgaagggcatcggcaaggcgggccagcagcctgcgaggaagcgactcaactttggtcagactggagacaccgactccgccgctgacccccagcctctcggagaaccaccagcagccccctctggtctgggaactggtacgatggcttcaggcagtggcgcaccaatggcagacaataacgaaggcgccgacggagtgggtaatgcctcgggaaattggcattgcgattccacatggctgggcgaccgagtcatcaccaccagcacccgcacctgggccctgcccacctacaacaaccatctctacaagcaaatctccagccagtctggagccaacaacgacaaccactactttggctacagcaccccctgggggtactttgacttcaaccgcttccactgccacttctccccgcgagactggcagcggctcatcaacaacaactgggggttccggcccaagcgactcaacttcaagctcttcaacatccaagtcaaggaggtcactcagacggacggcacgaagaccatcgccaataaccttaccagcacggttcaggtctttgcggactcggagtaccagctcccgtacgtcctcggatcagcgcaccagggctgcttcccgccgttcccggcggacgtcttcatggtcccgcagtacgggtatttgacgctgaacaacggcagccaggcgatgggtcgctcgtccttctactgcctggagtactttccgtcgcagatgctgcggacggggaacaacttcacgttcagctacaccttcgaggacgtgcccttccacagcagctacgcgcacagccagagtctggaccggctcatgaacccactcatcgaccagtacctgtactacctaagcaagacaaatggcggtctaggattttcccaagcgggacccaacagcatgcgcgaccagtccaggaattggctgccgggaccctgcttcagacaacaacggatttcaactgtacctacacaaaataacaacggagacttttcgtggacgggagccacaaagtatcatctcaatggaagaaactcagcaatgaatcccggcccggccatggccagccacaaagacgacgaacacagattcttccctcagaacggtgtgctcatctttggaaaacagggcgcagacaagacaaatgcgatactagaaaaagtgatcgttacagacgaagaggagattaggacaacaaatcctgtagccacggaggagtatgggtttgtcgccactaatctacaaagctcggcagaaacagccgagaccgaaagagtcaacgcgcaaggcatcctccctggcatggtgtggcaagaccgagatgtgtatctgcaggggcccatctgggccaagatcccccacaccgacggacacttccgcccctcaccactcatgggaggattcggcctcaagcacccgcctccgcagatcctcatcaagaacacgcctgtgccttcgaatcctccagagacgttcaacccggaaaagctcaattctttcataactcaatattctacgggccaggtcagcgtggagatcgagtgggagctgcagaaggagaacagcaagcgctggaaccccgaggtccagtacacgtccaactacaacaagtccgtcaacgtggaatttacagtggacaacaacggcgtgtattcggaaccgcgcaccatcggcacccgctaccttactcgtaatctgtaa

SEQ ID NO: 161 - DNA, 2151 bp, Adeno-associated virus
atgtcgtttgttgatcaccctccagattggcttgaggagattggtgagggtctaaaggagtttttgggactcgaacctggcccacccaaaccgaagcccaaccagcagaagcaagacaacgcccgtggtcttgtactgcctggatataattacctgggacccggcaacggtctcgaccgcggagaacctgtcaaccgggccgacgaggtcgcgcgagagcacgacatctcgtacaacgagcagctccaggcgggagacaacccctacctcaagtacaaccacgcggacgccgagtttcaagagaagctcgcggacgacacctccttcgggggcaacctcggcaaggcagtctttcaggccaagaaaagggttctcgaaccttttggcctggttgaggatcctgttaagacggctgctaaaggcgagcggatagacgaccactatcccaagaagaagaaggctcgggttgaagaaaccgaagctggaaccagcggagcccagcagctgcagatcccagcccaaccagcctcaagtttgggagctgatacaatgtctgcgggaggtggcagcccactgggcgacaataaccaaggcgccgatggagtgggcaatgcctcgggagattggcattgcgattccacatggatgggggacagagtcatcaccaagtccacccgaacctgggtgctgcccagctacaataaccacctgtacaaagagatccacaacaacggggtcgacggcagcaccgccaacgcttactttggatacagtaccccctgggggtactttgacttcaaccgcttccacagccactggagccctcgagactggcagcgactcatcaacaactactggggcttcagaccccggtccctcaaggtcaagattttcaacatccaagtcaaagaggtcacggtgcaggacaacaccaccaccatcgccaacaacctcacctccaccgtccaagtgtttacggacaacgactaccagctgccgtacgtcatcggcaacgggaccgaggggtgtctaccggccttccctccgcaggtctttacgctgccgcagtatggctacgcgacgctgaatcgcaacaatagcgaaaatcccaccgagcgaagcagcttcttctgtctggagtactttcccagcaagatgctgcggacgggcaacaactttgagttcacatacagcttcgaggaggtacccttccactgcagcttcgcgcccagccaaaacctcttcaaactggctaacccgttggtggatcagtacctttaccgcttcgtgagcacggacacctccggtgccgtccagttcaaaaagaacctggcgggcagatacgccaacacctacaagaactggttcccaggacccatgtgccgaacccagggctggtacacaggaacgggtatatataacaacaaaggcgctaccagctttaacacctcaaacagaatggacctagagggagccagttatcaagtgcctccccagcccaacgggatgacaaacacggttcaggacagcaacctttacgcgctggaaaacaccatgatttttaacgcacaaaacgccaccccgggaacgaatacaacgtatccggaggagaaccttttgataaccagtgagagcgagactcaacccgtgaacagagtggcttacagctccggaggacaaatagccaacaacaatcagaataccaacacggctcctactgcaggaacctacaaccaccaggaaatactacctggcagcgtgtggatggacagggacgtgtacctccagggtcccatctgggccaagatcccagagacaggggcacactttcatccttctccagccatgggcgggttcggactcaaatacccgcctcccatgatgctaatcaagaacacgccagtgcccggaaacatcaccaccttctcggacgtgcccgtccaaagttttattacccagtacagcaccggacaagtcaccgtggagatggagtgggagctcaagaaggaaaactctaagaggtggaaccccgagatacagtacaccaacaactacaacaaccctacgttcgtggactttgctccagacacagaaggagaatacaggaccactagggctattggaacccgctaccttacccgacctctgtaa

SEQ ID NO: 162 - DNA, 2184 bp, Adeno-associated virus
atgtcgtttgttgatcaccctccagattggttggaagaggttggtgaaggccttcacgagtttttggagctcgaagctggcccacccaaaccgaagcccaaccagcagaagcaggacaacgcccgtggtcttgtactgcctggatataattatctgggacccttcaacggactcgacaagggagagcccgtcaaccgagcggacgctgttgcgcgagagcacgacatctcgtacaacgagcagcttcaggcgggagacaacccctacctcaagtacaaccacgcggacgccgagtttcaggagaagctcaaggacgacacctcctttgggggcaacctcggaaaggcaatctttcaggccaagaaaagggttctcgaaccttttggcctggttgaagcgcctgttaagacggctccagccaagaagcggccgatagagaagtctccggcggaaccgagctcttcgaagggcatcggcaaggcgggccagcagcctgcgagaaagcggctcaactttggtcagactggagacaccgactccgccgctgacccccagcctctcggagaaccacccgcagccccctctggtctgggaactggtacgatggcttcaggcggtggcgcaccaatggcagacaataacgaaggcgccgacggagtgggtaatgcctcgggaaattggcattgcgattccacatggctgggcgaccgagtcatcaccaccagcacccgcacctgggccctgcccacctacaacaaccacctctacaagcaaatctcctctagcaattacggagccaacaacgacaaccactactttggctacagcaccccctgggggtattttgacttcaaccgtttccactgccacttctctccgcgagactggcagcggctcatcaacaacaactgggggttccggcccaagcgactcaacttcaagctgttcaacatccaagtcaaggaggtcacagaaacggacggcacgaagacgatcgccaataaccttaccagcacggttcaagtctttgcggactcggagtaccagctgccgtatgtcctcggctcggcacaccagggctgcttcccgccgttcccagcggacgtctttatgatcccacaatacggatacctgacgctgaacaacggcagccaggcgatgggtcgctcttccttctactgcctggaatactttccgtcgcagatgctgcggacgggaaacaacttcacgttcagctacacctttgaggacgtgcccttccacagcagctacgcgcacagccagagcctggaccggctgatgaacccgctcatcgaccagtacctgtactacctgagcaagacagccggtggtctggcgttttctcaagcagggcccaccaccatgcggaaccagtccaggaactggctcccgggaccctgcttccgacagcagcgagtttcagaaagatccacagaaaacaacaacggagacttctcgtggacagggaccacgagataccatcttaacggtagagactcggcgatgaatccgggcccggccatggccagtcacaaggacgacgaggacagattctttccgcaaaacggcgtgctcatctttggaacaccgaacgctactgcaagcaatgcacctctagagaatgtactgatcaccgatgaggaggaaatcagaactacgaaccctgtagccacggaagagtacgggatcgttgctaacaacaaacaggacagcagtacacaggcgacgaccgcgattgtcaacgcacaaggcatactgcccggcatggtgtggcaggatcgagatgtgtacctgcaggggcccatctgggccaagatcccccacacggatggacacttccacccatcaccgctcatgggcgggtttggccttaagcatccacctccgcagatcctcatcaagaacacgcctgtgccgtcgaaccctccagaaaagttcacccaggaaaaactaaatgccttcatcacacagtactcgacgggccaggtcagcgtggagatcgagtgggagctgcagaaggagaacagcaagcgctggaacccagaggtccagtacacgtccaactacaacaagtccgtcaacgtggactttactgtggacaccaacggcatgtactcggagccccgcactatcggcacccgctacctcacccgcaacctgtaa

SEQ ID NO: 163 - DNA, 201 bp, Adeno-associated virus
gcgattcccaatggttggacgacgcagtcgtcacccgatcaacaagaacctgggtgctccccagctacaacaaccacctctacaagagaatcactgggtcgaccagcgacgtcaacaaccggtactttggattcagtactccctggggatactttgacttcaaccgcttccactgtcacttctcacctcgagactggcagc

SEQ ID NO: 164 - DNA, 201 bp, Adeno-associated virus
gcgattcccaatggctggataacgcagtcgtcacccgatccacccgaacctgggtgctccccagctacaacaaccacctctacaaaaagatcgccggaaccggaaccgaccccaacaacaactactttggattcagcaccccgtggggatactttgactttaaccgcttccactgccacttctcccctcgagactggcaga

SEQ ID NO: 165 - DNA, 201 bp, Adeno-associated virus
gcgattcccaatggctggataacgcagtcgtcactcgatccacaagaacctgggtgctccccagctacaacaaccacctctacaaaaagatcgccggatccggaaccgaccccaacaacaactactttggattcagcactccgtggggatactttgactttaaccgcttccactgccacttctcccctcgagactggcaga

SEQ ID NO: 166 - DNA, 2208 bp, Adeno-associated virus
atggctgccgatggttatcttccagattggctcgaggacaacctctctgagggcattcgcgagtggtgggacttgaaacctggagccccgaaacccaaagccaaccagcaaaagcaggacgacggccggggtctggtgcttcctggctacaagtacctcggacccttcaacggactcgacaagggggagcccgtcaacgcggcggatgcagcggccctcgagcacgacaaggcctacgaccagcagctcaaagcgggtgacaatccgtacctgcggtataaccacgccgacgccgagtttcaggagcgtctgcaagaagatacgtcttttgggggcaacctcgggcgagcagtcttccaggccaagaagagggttctcgaaccttttggtctggttgaggaaggtgctaagacggctcctggaaagaaacgtccggtagagcagtcgccacaagagccagactcctcctcgggcattggcaagacaggccagcagcccgctaaaaagagactcaattttggtcagactggcgactcagagtcagtccccgacccacaacctctcggagaacctccagcaacccccgctgctgtgggacctactacaatggcttcaggcggtggcgcaccaatggcagacaataacgaaggcgccgacggagtgggtaatgcctcaggaaattggcattgcgattccacatggctgggcgacagagtcatcaccaccagcacccgaacatgggccttgcccacctataacaaccacctctacaagcaaatctccagtgcttcaacgggggccagcaacgacaaccactacttcggctacagcaccccctgggggtattttgatttcaacagattccactgccatttctcaccacgtgactggcagcgactcatcaacaacaattggggattccggcccaagagactcaacttcaagctcttcaacatccaagtcaaggaggtcacgacgaatgatggcgtcacgaccatcgctaataaccttaccagcacggttcaagtcttctcggactcggagtaccagttgccgtacgtcctcggctctgcgcaccagggctgcctccctccgttcccggcggacgtgttcatgattccgcagtacggctacctaacgctcaacaatggcagccaggcagtgggacggtcatccttttactgcctggaatatttcccatcgcagatgctgagaacgggcaataactttaccttcagctacaccttcgaggacgtgcctttccacagcagctacgcgcacagccagagcctggaccggctgatgaatcctctcatcgaccagtacctgtattacctgaacagaactcagaatcagtccggaagtgcccaaaacaaggacttgctgtttagccgggggtctccagctggcatgtctgttcagcccaaaaactggctacctggaccctgttaccggcagcagcgcgtttctaaaacaaaaacagacaacaacaacagcaactttacctggactggtgcttcaaaatataaccttaatgggcgtgaatctataatcaaccctggcactgctatggcctcacacaaagacgacgaagacaagttctttcccatgagcggtgtcatgatttttggaaaggagagcgccggagcttcaaacactgcattggacaatgtcatgatcacagacgaagaggaaatcaaagccactaaccccgtggccaccgaaagatttgggactgtggcagtcaatctccagagcagcagcacagaccctgcgaccggagatgtgcatgttatgggagccttacctggaatggtgtggcaagacagagacgtatacctgcagggtcctatttgggccaaaattcctcacacggatggacactttcacccgtctcctctcatgggcggctttggacttaagcacccgcctcctcagatcctcatcaaaaacacgcctgttcctgcgaatcctccggcagagttttcggctacaaagtttgcttcattcatcacccagtattccacaggacaagtgagcgtggagattgaatgggagctgcagaaagaaaacagcaaacgctggaatcccgaagtgcagtatacatctaactatgcaaaatctgccaacgttgatttcactgtggacaacaatggactttatactgagcctcgccccattggcacccgttacctcacccgtcccctg

SEQ ID NO: 167 - DNA, 2208 bp, Adeno-associated virus
atggctgccgatggttatcttccagattggctcgaggacaacctctctgagggcattcgcgagtggtgggacttgaaacctggagccccgaaacccaaagccaaccagcaaaagcaggacgacggccggggtctggtgcttcctggctacaagtacctcggacccttcaacggactcgacaagggggagcccgtcaacgcggcggatgcagcggccctcgagcacgacaaggcctacgaccagcagctcaaagcgggtgacaatccgtacctgcggtataaccacgccgacgccgagtttcaggagcgtctgcaagaagatacgtcttttgggggcaacctcgggcgagcagtcttccaggccaagaagagggttctcgaacctcttggtctggttgaggaaggtgctaagacggctcctggaaagaaacgtccggtagagcagtcgccacaagagccagactcctcctcgggcattggcaagacaggccagcagcccgctaaaaagagactcaattttggtcagactggcgactcagagtcagtccccgacccacaacctctcggagaacctccagcaacccccgctgctgtgggacctactacaatggcttcaggcggtggcgcaccaatggcagacaataacgaaggcgccgacggagtgggtaatgcctcaggaaattggcattgcgattccacatggctgggcgacagagtcatcaccaccagcacccgaacatgggccttgcccacctataacaaccacctctacaagcaaatctccagtgcttcaacgggggccagcaacgacaaccactacttcggctacagcaccccctgggggtattttgatttcaacagattccactgccatttctcaccacgtgactggcagcgactcatcaacaacaattggggattccggcccaagagactcaacttcaagctcttcaacatccaagtcaaggaggtcacgacgaatgatggcgtcacgaccatcgctaataaccttaccagcacggttcaagtcttctcggactcggagtaccagttgccgtacgtcctcggctctgcgcaccagggctgcctccctccgttcccggcggacgtgttcatgattccgcagtacggctacctaacgctcaacaatggcagccaggcagtgggacggtcatccttttactgcctggaatatttcccatcgcagatgctgagaacgggcaataactttaccttcagctacaccttcgaggacgtgcctttccacagcagctacgcgcacagccagagcctggaccggctgatgaatcctctcatcgaccagtacctgtattacctgaacagaactcagaatcagtccggaagtgcccaaaacaaggacttgctgtttagccgggggtctccagctggcatgtctgttcagcccaaaaactggctacctggaccctgttaccggcagcagcgcgtttctaaaacaaaaacagacaacaacaacagcaactttacctggactggtgcttcaaaatataaccttaatgggcgtgaatctataatcaaccctggcactgctatggcctcacacaaagacgacaaagacaagttctttcccatgagcggtgtcatgatttttggaaaggagagcgccggagcttcaaacactgcattggacaatgtcatgatcacagacgaagaggaaatcaaagccactaaccccgtggccaccgaaagatttgggactgtggcagtcaatctccagagcagcagcacagaccctgcgaccggagatgtgcatgttatgggagccttacctggaatggtgtggcaagacagagacgtatacctgcagggtcctatttgggccaaaattcctcacacggatggacactttcacccgtctcctctcatgggcggctttggacttaagcacccgcctcctcagatcctcatcaaaaacacgcctgttcctgcgaatcctccggcagagttttcggctacaaagtttgcttcattcatcacccagtattccacaggacaagtgagcgtggagattgaatgggagctgcagaaagaaaacagcaaacgctggaatcccgaagtgcagtatacatctaactatgcaaaatctgccaacgttgatttcactgtggacaacaatggactttatactgagcctcgccccattggcacccgttacctcacccgtcccctg

SEQ ID NO: 168 - DNA, 2208 bp, Adeno-associated virus
atggctgccgatggttatcttccagattggctcgaggacaacctctctgagggcattcgcgagtggtgggacttgaaacctggagccccgaaacccaaagccaaccagcaaaagcaggacgacggccggggtctggtgcttcctggctacaagtacctcggacccttcaacggactcgacaagggggagcccgtcaacgcggcggatgcagcggccctcgagcacgacaaggcctacgaccagcagctcaaagcgggtgacaatccgtacctgcggtataaccacgccgacgccgagtttcaggagcgtctgcaagaagatacgtcttttgggggcaacctcgggcgagcagtcttccaggccaagaagagggttctcgaacctcttggtctggttgaggaaggtgctaagacggctcctggaaagaaacgtccggtagagcagtcgccacaagagccagactcctcctcgggcattggcaagacaggccagcagcccgctaaaaagagactcaattttggtcagactggcgactcagagtcagtccccgacccacaacctctcggagaacctccagcaacccccgctgctgtgggacctactacaatggcttcaggcggtggcgcaccaatggcagacaataacgaaggcgccgacggagtgggtaatgcctcaggaaattggcattgcgattccacatggctgggcgacagagtcatcaccaccagcacccgaacatgggccttgcccacctataacaaccacctctacaagcaaatctccagtgcttcaacgggggccagcaacgacaaccactacttcggctacagcaccccctgggggtattttgatttcaacagattccactgccatttctcaccacgtgactggcagcgactcatcaacaacaattggggattccggcccaagagactcaacttcaagctcttcaacatccaagtcaaggaggtcacgacgaatgatggcgtcacgaccatcgctaataaccttaccagcacggttcaagtcttctcggactcggagtaccagttgccgtacgtcctcggctctgcgcaccagggctgcctccctccgttcccggcggacgtgttcatgattccgcagtacggctacctaacgctcaacaatggcagccaggcagtgggacggtcatccttttactgcctggaatatttcccatcgcagatgctgagaacgggcaataactttaccttcagctacaccttcgaggacgtgcctttccacagcagctacgcgcacagccagagcctggaccggctgatgaatcctctcatcgaccagtacctgtattacctgaacagaactcagaatcagtccggaagtgcccaaaacaaggacttgctgtttagccgggggtctccagctggcatgtctgttcagcccaaaaactggctacctggaccctgttaccggcagcagcgcgtttctaaaacaaaaacagacaacaacaacagcaactttacctggactggtgcttcaaaatataaccttaatgggcgtgaatctataatcaaccctggcactgctatggcctcacacaaagacgacgaagacaagttctttcccatgagcggtgtcatgatttttggaaaggagagcgccggagcttcaaacactgcattggacaatgtcatgatcacagacgaagaggaaatcaaagccactaaccccgtggccaccgaaagatttgggactgtggcagtcaatctccagagcagcagcacagaccctgcgaccggagatgtgcatgttatgggagccttacctggaatggtgtggcaagacagagacgtatacctgcagggtcctatttgggccaaaattcctcacacggatggacactttcacccgtctcctctcatgggcggctttggacttaagcacccgcctcctcagatcctcatcaaaaacacgcctgttcctgcgaatcctccggcagagttttcggctacaaagtttgcttcattcatcacccagtattccacaggacaagtgagcgtggagattgaatgggagctgcagaaagaaaacagcaaacgctggaatcccgaagtgcagtatacatctaactatgcaaaatctgccaacgttgatttcactgtggacaacaatggactttatactgagcctcgccccattggcacccgttacctcacccgtcccctg

SEQ ID NO: 169 - DNA, 2205 bp, Adeno-associated virus
atggctgccgatggttatcttccagattggctcgaggacactctctctgaaggaatcagacagtggtggaagctcaaacctggcccaccaccgccgaaacctaaccaacaacaccgggacgacagtaggggtcttgtgcttcctgggtacaagtacctcggacccttcaacggactcgacaaaggagagccggtcaacgaggcagacgccgcggccctcgagcacgacaaagcctacgaccaccagctcaagcaaggggacaacccgtacctcaaatacaaccacgcggacgctgaatttcaggagcgtcttcaagaagatacgtctttcgggggcaacctcgggcgagcagtcttccaggccaaaaagagggtactcgagcctcttggtctggttgaggaagctgttaagacggctcctggaaaaaagagacctatagagcagtctcctgcagaaccggactcttcctcgggcatcggcaaatcaggccagcagcccgctaagaaaagactcaattttggtcagactggcgacacagagtcagtcccagaccctcaaccaatcggagaaccccccgcagccccctctggtgtgggatctaatacaatggcttcaggcggtggggcaccaatggcagacaataacgaaggcgccgacggagtgggtaattcctcgggaaattggcattgcgattccacatggatgggcgacagagttatcaccaccagcacaagaacctgggccctccccacctacaataatcacctctacaagcaaatctccagcgaatcgggagccaccaacgacaaccactacttcggctacagcaccccctgggggtattttgactttaacagattccactgtcacttctcaccacgtgactggcagcgactcatcaacaacaactggggatttagacccaagaaactcaatttcaagctcttcaacatccaagtcaaggaggtcacgcagaatgatggaaccacgaccatcgccaataaccttaccagcacggtgcaggtcttcacagactctgagtaccagctgccctacgtcctcggttcggctcaccagggctgccttccgccgttcccagcagacgtcttcatgattcctcagtacggctacttgactctgaacaatggcagccaagcggtaggacgttcttcattctactgtctagagtattttccctctcagatgctgaggacgggaaacaacttcaccttcagctacacttttgaagacgtgcctttccacagcagctacgcgcacagccagagtctggatcggctgatgaatcctctcattgaccagtacctgtattacctgagcaaaactcagggtacaagtggaacaacgcagcaatcgagactgcagttcagccaagctgggcctagctccatggctcagcaggccaaaaactggctaccgggacccagctaccgacagcagcgaatgtctaagacggctaatgacaacaacaacagtgaatttgcttggactgcagccaccaaatattacctgaatggaagaaattctctggtcaatcccgggcccccaatggccagtcacaaggacgatgaggaaaagtatttccccatgcacggaaatctcatctttggaaaacaaggcacaggaactaccaatgtggacattgaatcagtgcttattacagacgaagaagaaatcagaacaactaatcctgtggctacagaacaatacggacaggttgccaccaaccatcagagtcagaacaccacagcttcctatggaagtgtggacagccagggaatcttacctggaatggtgtggcaggaccgcgatgtctatcttcaaggtcccatttgggccaaaatccctcacacggacggacactttcatccttctccgctcatgggaggctttggactgaaacaccctcctccccagatcctgatcaaaaacacacctgtgccagcgaatcccgcgaccactttcactcctggaaagtttgcttcgttcattacccagtattccaccggacaggtcagcgtggaaatagagtgggagctgcagaaagaaaacagcaaacgctggaacccagaaattcagtacacctccaactacaacaagtcggtgaatgtggagtttaccgtggacgcaaacggtgtttattctgaaccccgccctattggcactcgttaccttacccggaacttg

SEQ ID NO: 170 - DNA, 2184 bp, Adeno-associated virus
atggctgccgatggttatcttccagattggctcgaggacaacctctctgagggcattcgcgagtggtgggacttgaaacctggagccccgaaacccaaagccaaccagcaaaagcaggacgacggccggggtctggtgcttcctggctacaggtacctcggacccttcaacggactcgacaagggagagccggtcaacgaggcagacgccgcggccctcgagcacgacaaggcctacgacaagcagctcgagcagggggacaacccgtacctcaagtacaaccacgccgacgccgagtttcaggagcgtcttcaagaagatacgtcttttgggggcaacctcgggcgagcagtcttccaggccaagaagcgggttctcgaacctctcggtctggttgaggaaggcgctaagacggctcctggaaagaagagacccatagaatcccccgactcctccacgggcatcggcaagaacggccagccgcccgctaaaaagaagctcaactttgggcagactggcgactcagagtcagtgcccgacccccaacctctcggagaacctcccgccgcgccctcaggtctgggatctggtacaatggctgcaggcggtggcgcaccaatggcagacaataacgaaggcgccgacggagtgggtaatgcctccggaaattggcattgcgattccacatggctgggcgacagagtcatcaccaccagcacccgcacctgggccctgcccacctacaacaaccacctctacaagcagatatcaagtcagagcggggctaccaacgacaaccacttcttcggctacagcaccccctggggctattttgacttcaacagattccactgccacttctcaccacgtgactggcagcgactcatcaacaacaactggggattccggcccagaaagctgcggttcaagttgttcaacatccaggtcaaggaggtcacgacgaacgacggcgttacgaccatcgctaataaccttaccagcacgattcaggtcttctcggactcggagtaccaactgccgtacgtcctcggctctgcgcaccagggctgcctccctccgttccctgcggacgtgttcatgattcctcagtacggatatctgactctaaacaacggcagtcagtctgtgggacgttcctccttctactgcctggagtactttccttctcagatgctgagaacgggcgataactttgaattcagctacacctttgaggaagtgcctttccacagcagctatgcgcacagccagagcctggaccggctgatgaatcccctcatcgaccagtacctgtactacctggcccggacccagagcactacggggtccacaagggagctgcagttccatcaggctgggcccaacaccatggccgagcaatcaaagaactggctgcccggaccctgttatcggcagcagagactgtcaaaaaacatagacagcaacaacaacagtaactttgcctggaccggggccactaaataccatctgaatggtagaaattcattaaccaacccgggcgtagccatggccaccaacaaggacgacgaggaccagttctttcccatcaacggagtgctggtttttggcaaaacgggggctgccaacaagacaacgctggaaaacgtgctaatgaccagcgaggaggagatcaaaaccaccaatcccgtggctacagaagaatacggtgtggtctccagcaacctgcaatcgtctacggccggaccccagacacagactgtcaacagccagggggctctgcccggcatggtctggcagaaccgggacgtgtacctgcagggtcccatctgggccaaaattcctcacacggacggcaactttcacccgtctcccctgatgggcggatttggactcaaacacccgcctcctcaaattctcatcaaaaacaccccggtacctgctaatcctccagaggtgtttactcctgccaagtttgcctcatttatcacgcagtacagcaccggccaggtcagcgtggagatcgagtgggaactgcagaaagaaaacagcaaacgctggaatccagagattcagtacacctcaaattatgccaagtctaataatgtggaatttgctgtcaacaacgaaggggtttatactgagcctcgccccattggcacccgttacctcacccgtaacctg

SEQ ID NO: 171 - DNA, 2184 bp, Adeno-associated virus
atggctgccgatggttatcttccagattggctcgaggacaacctctctgagggcattcgcgagtggtgggacttgaaacctggagccccgaaacccaaagccaaccagcaaaagcaggacgacggccggggtctggtgcttcctggctacaagtacctcggacccttcaacggactcgacaagggagagccggtcaacgaggcagacgccgcggccctcgagcacgacaaggcctacgacaagcagctcgagcagggggacaacccgtacctcaagtacaaccacgccgacgccgagtttcaggagcgtcttcaagaagatacgtcttttgggggcaacctcgggcgagcagtcttccaggccaagaagcgggttctcgaacctctcggtctggttgaggaaggcgctaagacggctcctggaaagaagagacccatagaatcccccgactcctccacgggcatcggcaagaagggccagcagcccgctaaaaagaagctcaactttgggcagactggcgactcagagtcagtgcccgacccccaacctctcggagaacctcccgccgcgccctcaggtctgggatctggtacaatggctgcaggcggtggcgcaccaatggcagacaataacgaaggcgccgacggagtgggtaatgcctccggaaattggcattgcgattccacatggctgggcgacagagtcatcaccaccagcacccgcacctgggccctgcccacctacaacaaccacctctacaagcagatatcaagtcagagcggggctaccaacgacaaccacttcttcggctacagcaccccctggggctattttgacttcaacagattccactgccacttctcaccacgtgactggcagcgactcatcaacaacaactggggattccggcccagaaagctgcggttcaagttgttcaacatccaggtcaaggaggtcacgacgaacgacggcgttacgaccatcgctaataaccttaccagcacgattcaggtcttctcggactcggagtaccaactgccgtacgtcctcggctctgcgcaccagggctgcctccctccgttccctgcggacgtgttcatgattcctcagtacggatatctgactctaaacaacggcagtcagtctgtgggacgttcctccttctactgcctggagtactttccttctcagatgctgagaacgggcaataactttgaattcagctacacctttgaggaagtgcctttccacagcagctatgcgcacagccagagcctggaccggctgatgaatcccctcatcgaccagtacctgtactacctggcccggacccagagcactacggggtccacaagggagctgcagttccatcaggctgggcccaacaccatggccgagcaatcaaagaactggctgcccggaccctgttatcggcagcagagactgtcaaaaaacatagacagcaacaacaacagtaactttgcctggaccggggccactaaataccatctgaatggtagaaattcattaaccaacccgggcgtagccatggccaccaacaaggacgacgaggaccagttctttcccatcaacggagtgctggtttttggcaaaacgggggctgccaacaagacaacgctggaaaacgtgctaatgaccagcgaggaggagatcaaaaccaccaatcccgtggctacagaagaatacggtgtggtctccagcaacctgcaatcgtctacggccggaccccagacacagactgtcaacagccagggggctctgcccggcatggtctggcagaaccgggacgtgtacctgcagggtcccatctgggccaaaattcctcacacggacggcaactttcacccgtctcccctgatgggcggatttggactcaaacacccgcctcctcaaattctcatcaaaaacaccccggtacctgctaatcctccagaggtgtttactcctgccaagtttgcctcatttatcacgcagtacagcaccggccaggtcagcgtggagatcgagtgggaactgcagaaagaaaacagcaaacgctggaatccagagattcagtacacctcaaattatgccaagtctaataatgtggaatttgctgtcaacaacgaaggggtttatactgagcctcgccccattggcacccgttacctcacccgtaacctg

SEQ ID NO: 172 - DNA, 2205 bp, Adeno-associated virus
atggctgccgatggttatcttccagattggctcgaggacactctctctgaaggaataagacagtggtggaagctcaaacctggcccaccaccaccaaagcccgcagagcggcataaggacgacagcaggggtcttgtgcttcctgggtacaagtacctcggacccttcaacggactcgacaagggagagccggtcaacgaggcagacgccgcggccctcgagcacgacaaggcctacgaccggcagctcgacagcggagacaacccgtacctcaagtacaaccacgccgacgcagagtttcaggagcgccttaaagaagatacgtcttttgggggcaacctcggacgagcagtcttccaggcaaaaaagagggttctggaacctctgggcctggttgaggagcctgttaagacggctccgggaaaaaagaggccggtagagcactctcctgcagagccagattcctcctccggaactggaaagtcgggcaaccagcctgcaagaaagagattgaatttcggtcagactggagactcagactccgtacctgacccccagcctctcggacagccaccagcagccccctctggtctgggaactaatacgatggctacaggcagtggcgcaccaatggcagacaataacgagggcgccgacggagtgggtaattcctcgggaaattggcattgcgattccacatggatgggcgacagagtcatcaccaccagcacccgaacctgggccctgcccacctacaacaaccatctgtacaagcaaatatccagccagtctggagccagcaacgacaatcactactttggctacagcaccccctgggggtattttgacttcaacagattccactgccacttttcaccacgtgactggcaaagactcatcaacaacaactggggattccgacccaagagactcaacttcaagctctttaacattcaagtcaaagaggtcacgcagaatgacggtacgacgacgattgccaataaccttaccagcacggttcaggtgtttactgactcggagtaccagctcccgtacgtcctcggctcggcgcatcaaggatgcctcccgccgttcccagcagacgtcttcatggtgccacagtatggatacctcaccctgaacaacgggagtcaggcagtaggacgctcttcattttactgcctagagtactttccttctcagatgctgcgtaccggaaacaactttaccttcagctacacctttgaggacgttcctttccacagcagctacgctcacagccagagtttggaccgtctcatgaatcctctcatcgaccagtacctgtattacttgagcagaacaaacactccaagcggaaccaccacgcagtccaggcttcagttttctcaggccggagcgagtgacattcgggaccagtctaggaactggcttcctggaccctgttaccgtcagcagcgagtatcaaagacatctgcggataacaacaacagtgaatactcgtggactggagctaccaagtaccacctcaatggcagagactctctggtgaatccgggcccggccatggccagccacaaagacgatgaagaaaagttttttcctcagagcggggttcttatctttgggaagcaaggcccagagaaaacaaatgtggatattgaaaaggtcatgattacagacgaagaggaaatcaggaccaccaatcccgtggctacggagcagtatggttctgtatctaccaacctccagagcggcaacacacaagcagctaccgcagatgtcaacacacaaggcgttcttccaggcatggtctggcaagacagagacgtgtacctgcaggggcctatttgggcaaagattccacacacggacggacattttcacccctctcccctcatgggcggatttggacttaaacaccctcctccacagattctcatcaagaacaccccggtacctgcgaatccttcgaccaccttcagtgcggcaaagtttgcttccttcattacacagtactccacggggcaggtcagcgtggagatcgagtgggagctgcagaaggagaacagcaaacgctggaatcccgagatccagtacacttccaactacaacaagtctgttaatgtggactttactgtggacactaatggcgtgtattcagagcctcgccccattggcaccagatacctgactcgtaatctg

SEQ ID NO: 173 - DNA, 2208 bp, Adeno-associated virus
atggctgccgatggttatcttccagattggctcgaggacactctctctgaaggaataagacagtggtggaagctcagacctggcccaccaccaccaaagcccgcagagcggcataaggacgacagcaggggtcttgtgcttcctgggtacaagtacctcggacccttcaacggactcgacaagggagagccggtcaacgaggcagacgccgcggccctcgagcacgacaaagcctacgaccggcagctcgacagcggagacaacccgtacctcaagtacaaccacgccgacgcggagtttcaggagcgccttaaagaagatacgtcttttgggggcaacctcgggcgagcagtcttccaggccaagaagcgggttctcgaacctctcggtctggttgaggaaggcgctaagacggctcctggaaagaaacgtccggtagagcagtcgccacaagggccagactcctcctcgggcatcggcaagacaggccagcagcccgctaaaaagagactcaattttggtcagactggcgactcagagtcagtccccgatccacaacctctcggagaacctccagcaacccccgctgctgtgggacctactacaatggcttcaggcggtggcgcaccaatggcagacaataacgaaggcgccgacggagtgggtaatgcctcaggaaattggcattgcgattccacatggctgggcgacagagtcatcaccaccagcacccgcacctgggccttgcccacctacaataaccacctctacaagcaaatctccagtgcttcaacgggggccagcaacgacaaccactacttcggctacagcaccccctgggggtattttgatttcaacagattccactgccacttttcaccacgtgactggcagcgactcatcaacaacaattggggattccggcccaagagactcaacttcaaactcttcaacatccaagtcaaggaggtcacgacgaatgatggcgtcacaaccatcgctaataaccttaccagcacggttcaagtcttctcggactcggagtaccagcttccgtacgtcctcggctctgcgcaccagggctgcctccctccgttcccggcggacgtgttcatgattccgcaatacggctacctgacgctcaacaatggcagccaagccgtgggacgttcatccttttactgcctggaatatttcccttctcagatgctgagaacgggcaacaactttaccttcagctacacctttgaggaagtgcctttccacagcagctacgcgcacagccagagcctggaccggctgatgaatcctctcatcgaccaatacctgtattacctgaacagaactcaaaatcagtccggaagtgcccaaaacaaggacttgctgtttagccgtgggtctccagctggcatgtctgttcagcccaaaaactggctacctggaccctgttatcggcagcagcgcgtttctaaaacaaaaacagacaacaacaacagcaattttacctggactggtgcttcaaaatataacctcaatgggcgtgaatccatcatcaaccctggcactgctatggcctcacacaaagacgacgaagacaagttctttcccatgagcggtgtcatgatttttggaaaagagagcgccggagcttcaaacactgcattggacaatgtcatgattacagacgaagaggaaattaaagccactaaccctgtggccaccgaaagatttgggaccgtggcagtcaatttccagagcagcagcacagaccctgcgaccggagatgtgcatgctatgggagcattacctggcatggtgtggcaaggtagagacgtgtacctgcagggtcccatttgggccaaaattcctcacacagatggacactttcacccgtctcctcttatgggcggctttggactcaagaacccgcctcctcagatcctcatcaaaaacacgcctgttcctgcgaatcctccggcggagttttcagctacaaagtttgcttcattcatcacccaatactccacaggacaagtgagtgtggaaattgaatgggagctgcagaaagaaaacagcaagcgctggaatcccgaagtgcagtacacatccaattatgcaaaatctgccaacgttgattttactgtggacaacaatggactttatactgagcctcgccccattggcacccgttaccttacccgtcccctg

SEQ ID NO: 174 - DNA, 2208 bp, Adeno-associated virus
atggctgccgatggttatcttccagattggctcgaggacactctctctgaaggaataagacagtggtggaagctcagacctggcccaccaccaccaaagcccgcagagcggcataaggacgacagcaggggtcttgtgcttcctgggtacaagtacctcggacccttcaacggactcgacaagggagagccggtcaacgaggcagacgccgcggccctcgagcacgacaaagcctacgaccggcagctcgacagcggagacaacccgtacctcaagtacaaccacgccgacgcggagtttcaggagcgccttaaagaagatacgtcttttgggggcaacctcgggcgagcagtcttccaggccaagaagcgggttctcgaacctctcggtctggttgaggaaggcgctaagacggctcctggaaagaaacgtccggtagagcagtcgccacaagggccagactcctcctcgggcatcggcaagacaggccagcagcccgctaaaaagagactcaattttggtcagactggcgactcagagtcagtccccgatccacaacctctcggagaacctccagcaacccccgctgctgtgggacctactacaatggcttcaggcggtggcgcaccaatggcagacaataacgaaggcgccgacggagtgggtaatgcctcaggaaattggcattgcgattccacatggctgggcgacagagtcatcaccaccagcacccgcacctgggccttgcccacctacaataaccacctctacaagcaaatctccagtgcttcaacgggggccagcaacgacaaccactacttcggctacagcaccccctgggggtattttgatttcaacagattccactgccacttttcaccacgtgactggcagcgactcatcaacaacaattggggattccggcccaagagactcaacttcaaactcttcaacatccaagtcaaggaggtcacgacgaatgatggcgtcacaaccatcgctaataaccttaccagcacggttcaagtcttctcggactcggagtaccagcttccgtacgtcctcggctctgcgcaccagggctgcctccctccgttcccggcggacgtgttcatgattccgcaatacggctacctgacgctcaacaatggcagccaagccgtgggacgttcatccttttactgcctggaatatttcccttctcagatgctgagaacgggcaacaactttaccttcagctacacctttgaggaagtgcctttccacagcagctacgcgcacagccagagcctggaccggctgatgaatcctctcatcgaccaatacctgtattacctgaacagaactcaaaatcagtccggaagtgcccaaaacaaggacttgctgtttagccgtgggtctccagctggcatgtctgttcagcccaaaaactggctacctggaccctgttatcggcagcagcgcgtttctaaaacaaaaacagacaacaacaacagcaattttacctggactggtgcttcaaaatataacctcaatgggcgtgaatccatcatcaaccctggcactgctatggcctcacacaaagacgacgaagacaagttctttcccatgagcggtgtcatgatttttggaaaagagagcgccggagcttcaaacactgcattggacaatgtcatgattacagacgaagaggaaattaaagccactaaccctgtggccaccgaaagatttgggaccgtggcagtcaatttccagagcagcagcacagaccctgcgaccggagatgtgcatgctatgggagcattacctggcatggtgtggcaagacagagacgtgtacctgcagggtcccatttgggccaaaattcctcacacagatggacactttcacccgtctcctcttatgggcggctttggactcaagaacccgcctcctcagatcctcatcaaaaacacgcctgttcctgcgaatcctccggcggagttttcagctacaaagtttgcttcattcatcacccaatactccacaggacaagtgagtgtggaaattgaatgggagctgcagaaagaaaacagcaagcgctggaatcccgaagtgcagtacacatccaattatgcaaaatctgccaacgttgattttactgtggacaacaatggactttatactgagcctcgccccattggcacccgttaccttacccgtcccctg

SEQ ID NO: 175 - DNA, 2208 bp, Adeno-associated virus
atggctgccgatggttatcttccagattggctcgaggacaacctctctgagggcattcgcgagtggtgggacttgaaacctggagccccgaagcccaaagccaaccagcaaaagcaggacgacggccggggtctggtgcttcctggctacaagtacctcggacccttcaacggactcgacaagggggagcccgtcaacgcggcggacgcagcggccctcgagcacgacaaggcctacgaccagcagctcaaagcgggtgacaatccgtacctgcggtataaccacgccgacgccgagtttcaggagcgtctgcaagaagatacgtcttttgggggcaacctcgggcgagcagtcttccaggccaagaagcgggttctcgaacctctcggtctggttgaggaaggcgctaagacggctcctggaaagaaacgtccggtagagcagtcgccacaagagccagactcctcctcgggcatcggcaagacaggccagcagcccgctaaaaagagactcaattttggccagactggcgactcagagtcagtccccgatccacaacctctcggagaacctccagcaacccccgctgctgtgggacctactacaatggcttcaggcggtggcgcaccaatggcagacaataacgaaggcgccgacggagtgggtaatgcctcaggaaattggcattgcgattccacatggctgggcgacagagtcatcaccaccagcacccgcacctgggccttgcccacctacaataaccacctctacaagcaaatctccagtacttcaacgggggccagcaacgacaaccactacttcggctacagcaccccctgggggtattttgatttcaacagattccactgccacttttcaccacgtgactggcagcgactcatcaacaacaattggggattccggcccaagagactcaacttcaaactcttcaacatccaagtcaaggaggtcacgacgaatgatggcgtcacaaccatcgctaataaccttaccagcacggttcaagtcttctcggactcggagtaccagcttccgtacgtcctcggctctgcgcaccagggctgcctccctccgttcccggcggacgtgttcatgattccgcaatacggctacctgacgctcaacaatggcagccaagccgtgggacgttcatccttttactgcctggaatatttcccttctcagatgctgagaacgggcaacaactttaccttcagctacacctttgaggaagtgcctttccacagcagctacgcgcacagccagagcctggaccggctgatgaatcctctcatcgaccaatacctgtattacctgaacagaacacaaaatcagtccggaagtgcccaaaacaaggacttgctgtttagccgtgggtctccagctggcatgtctgttcagcccaaaaactggctacctggaccctgttatcggcagcagcgcgtttctaaaacaaaaacagacaacaacaacagcaattttacctggactggtgcttcaaaatataacctcaatgggcgtgaatccatcatcaaccctggcaccgctgtggcctcacacaaagacgacgaagacaagttctttcccatgagcggtgtcatgatttttggaaaagagagcgccggagcttcaaacactgcattggacaatgtcatgattacagacgaagaggaaattaaagccactaaccctgtggccaccgaaagatttgggaccgtggcagtcaatttccagagcagcagcacagaccctgcgaccggagatgtgcatgctatgggagcattacctggcatggtgtggcaagatagagacgtgtacctgcagggtcccatttgggccaaaattcctcacacagatggacactttcacccgtctcctcttatgggcggctttggactcaagaacccgcctcctcagatcctcatcaaaaacacgcctgttcctgcgaatcctccggcggagttttcagctacaaagtttgcttcattcatcacccaatactccacaggacaagtgagtgtggaaattgaatgggagctgcagaaagaaaacagcaagcgctggaatcccgaagtgcagtacacatccaattatgcaaaatctgccaacgttgattttactgtggacaacaatggactttatactgagcctcgccccattggcacccgttaccttacccgtcccctg

SEQ ID NO: 176 - DNA, 2214 bp, Adeno-associated virus
atggctgccgatggttatcttccagattggctcgaggacaacctctctgagggcattcgcgagtggtgggacctgaaacctggagccccgaaacccaaagccaaccagcaaaagcaggacgacggccggggtctggtgcttcctggctacaagtacctcggacccttcaacggactcgacaagggggagcccgtcaacgcggcggacgcagcggccctcgagcacgacaaggcctacgaccagcagctcaaagcgggtgacaatccgtacctgcggtataaccacgccgacgccgagtttcaggagcgtctgcaagaagatacgtcttttgggggcaacctcgggcgagcagtcttccaggccaagaagcgggttctcgaacctctcggtctggttgaggaaggcgctaagacggctcctggaaagaagagaccggtagagccatcacctcagcgttcccccgactcctccacgggcatcggcaagaaaggccaccagcccgcgagaaagagactgaactttgggcagactggcgactcggagtcagtccccgaccctcaaccaatcggagaaccaccagcaggcccctctggtctgggatctggtacaatggctgcaggcggtggcgctccaatggcagacaataacgaaggcgccgacggagtgggtagttcctcaggaaattggcattgcgattccacatggctgggcgacagagtcatcaccaccagcacccgaacctgggccctgcccacctacaacaaccatctctacaagcaaatctccaacgggacatcgggaggaagcactaacgacaacacctactttggctacagcaccccctgggggtattttgacttcaacagattccactgccacttctcaccacgtgactggcagcgactcatcaacaataactggggattccggcccaagagactcaacttcaagctcttcaacatccaggtcaaggaggtcacgcagaatgaaggcaccaagaccatcgccaataaccttaccagcacgattcaggtgtttacggactcggaataccagctcccgtacgtccccggctctgcgcaccagggctgcctccctccgttcccggcggacgtcttcatgattcctcagtacgggtatctgaccctaaacaatggcagtcaggctgtgggccgttcctccttctactgcctggaatacttcccttctcaaatgctgaggacgggcaacaactttgaattcagctacaccttcgaggacgtgcctttccacagcagctacgcgcacagccagagcctggaccggctgatgaaccctctcatcgaccagtacctgtattacttatccagaactcagtccacaggaggaactcaaggtactcagcaattgttattttctcaagccgggcccgcaaacatgtcggctcaggccaagaactggctacctggaccgtgttaccgtcagcaacgagtttccacgacactgtcgcaaaacaacaacagcaattttgcttggaccggtgccaccaagtatcacctgaatggcagagactccctggttaatcccggcgttgccatggctacccacaaggacgacgaggagcgcttcttcccgtcaagcggagttctaatgtttggcaagcagggggctggaaaagacaatgtggactacagcagcgtgatgctcaccagcgaagaagaaattaaaactactaacccagtggctacagagcagtatggtgtggtggcagacaacctgcagcagaccaacggagctcccattgtgggaactgtcaacagccagggggccttacctggtatggtctggcaaaaccgggacgtgtacctgcagggccccatctgggccaaaattcctcacacggacggcaactttcatccttcgccgctgatgggaggctttggactgaaacacccgcctcctcagatcctgatcaaaaacactcctgttcctgcggatcctccgaccaccttcagccaggccaagctggcttcttttatcacgcagtacagcaccggacaggtcagcgtggaaatcgaatgggagctgcagaaagaaaacagcaagcgctggaacccagagattcagtatacttccaactactacaaatctacaaatgtggactttgctgtcaatactgagggtacttattcagagcctcgccccattggcactcgttatctcacccgtaatctg

SEQ ID NO: 177 - DNA, 2187 bp, Adeno-associated virus
atggctgccgatggttatcttccagattggctcgaggacaacctctctgagggcattcgcgagtggtgggacctgaaacctggagccccgaaacccaaagccaaccagcaaaagcaggacgacggccggggtctggtgcttcctggctacaagtacctcggacccttcaacggactcgacaagggggagcccgtcaacgcggcggacgcagcggccctcgagcacgacaaggcctacgaccagcagctcaaagcgggtgacaatccgtacctgcggtataaccacgccgacgccgagtttcaggagcgcctgcaagaagatacgtcatttgggggcaacctcgggcgagcagtcttccaggccaagaagcgggttctcgaacctctcggtctggttgaggaaggcgctaagacggctcctggaaagaagagacccatagactctccagactcctccacgggcatcggcaaaaaaggccagcagcccgctaaaaagaagctcaattttggtcagactggcgactcagagtcagtccccgaccctcaacctcttggagaacctccagcagcgccctctagtgtgggatctggtacaatggctgcaggcggtggcgcaccaatggcagacaataacgaaggtgccgacggagtgggtaatgcctcaggaaattggcattgcgattccacatggctgggcgacagagtcatcaccaccagcaccagaacctgggccctccccacctacaacaaccacctctacaagcaaatctccagcagcagctcaggagccaccaatgacaaccactacttcggctacagcaccccctgggggtattttgactttaacagattccactgccacttctcaccacgtgactggcagcgactcatcaacaacaactggggattccggcccaagaagctgcggttcaagctcttcaacatccaggtcaaggaggtcacaacgaatgacggcgtcacgaccatcgctaataaccttaccagcacggttcaggtcttctcggactcggaataccagctgccgtacgtcctcggctctgcgcaccagggctgcctgcctccgttcccggcggacgtcttcatgattcctcagtacggctacctgactctgaacaacggcagccaatcggtgggccgttcctccttctactgcctggaatatttcccctctcaaatgctgagaacgggcaacaactttgagttcagttacagcttcgaggacgtgcctttccacagcagctacgcgcacagccagagcctagaccggctgatgaaccctctcatcgaccagtacctgtactacctggcccggacccagagcaccacgggttccaccagggaactgcaatttcatcaagctgggcccaatactatggccgagcagtcaaagaactggctgcctggaccctgctataggcaacagagactgtcaaagaacttggactttaacaacaacagcaattttgcctggactgctgccactaaatatcatctgaatggcagaaactctttgaccaatcctggcattcccatggcaaccaacaaggatgatgaggaccagttctttcccatcaacggggtactggtttttggcaagacgggagctgccaacaaaactacgctggaaaacgttctgatgaccagcgaggaggagatcaagaccactaaccctgtggctacagaagaatacggtgtggtctccagcaacctgcagtcgtctacagccgggcctcaatcacagactatcaacagccagggagcactgcctggcatggtctggcagaaccgggacgtgtatctgcagggtcccatctgggccaaaattcctcacacggatggcaactttcacccgtctcctctgatgggcggttttggactcaaacacccgcctccacagatcctgatcaaaaacacacctgtacctgctaatcctccggaggtgtttactcctgccaagtttgcctccttcatcacgcagtacagcaccggacaagtcagcgtggaaatcgagtgggagctgcagaaagaaaacagcaagcgctggaacccagaaattcagtatacttccaattatgccaagtctaataatgttgaatttgctgtgaaccctgatggtgtttatactgagcctcgccccattggcactcgttacctcacccgtaatctg

SEQ ID NO: 178 - DNA, 2214 bp, Adeno-associated virus
atggctgccgatggttatcttccagattggctcgaggacaacctctctgagggcattcgcgagtggtgggcgctgaaacctggagccccgaagcccaaagccaaccagcaaaagcaggacgacggccggggtctggtgcttcctggctacaagtacctcggacccttcaacggactcgacaagggggagcccgtcaacgcggcggacgcagcggccctcgagcacgacaaggcctacgaccagcagctcaaagcgggtgacaatccgtacctgcggtataaccacgccgacgccgagtttcaggagcgtctgcaagaagatacgtcttttgggggcaacctcgggcgagcagtcttccaggccaagaagcgggttctcgaacctctcggtctggttgaggaagctgctaagacggctcctggaaagaagagaccggtagaaccgtcacctcagcgttcccccgactcctccacgggcatcggcaagaaaggccagcagcccgctaaaaagagactgaactttggtcagactggcgactcagagtcagtccccgaccctcaaccaatcggagaaccaccagcaggcccctctggtctgggatctggtacaatggctgcaggcggtggcgctccaatggcagacaataacgaaggcgccgacggagtgggtagttcctcaggaaattggcattgcgattccacatggctgggcgacagagtcatcaccaccagcacccgaacctgggccctgcccacctacaacaaccacctctacaagcaaatatccaatgggacatcgggaggaagcaccaacgacaacacctacttcggctacagcaccccctgggggtattttgacttcaacagattccactgccacttctcaccacgtgactggcagcgactcatcaacaacaactggggattccggccaaaaagactcagcttcaagctcttcaacatccaggtcaaggaggtcacgcagaatgaaggcaccaagaccatcgccaataaccttaccagcacgattcaggtatttacggactcggaataccagctgccgtacgtcctcggctccgcgcaccagggctgcctgcctccgttcccggcggacgtcttcatgattccccagtacggctaccttacactgaacaatggaagtcaagccgtaggccgttcctccttctactgcctggaatattttccatctcaaatgctgcgaactggaaacaattttgaattcagctacaccttcgaggacgtgcctttccacagcagctacgcacacagccagagcttggaccgactgatgaatcctctcatcgaccagtacctgtactacttatccagaactcagtccacaggaggaactcaaggtacccagcaattgttattttctcaagctgggcctgcaaacatgtcggctcaggctaagaactggctacctggaccttgctaccggcagcagcgagtctctacgacactgtcgcaaaacaacaacagcaactttgcttggactggtgccaccaaatatcacctgaacggaagagactctttggtaaatcccggtgtcgccatggcaacccacaaggacgacgaggaacgcttcttcccgtcgagtggagtcctgatgtttggaaaacagggtgctggaagagacaatgtggactacagcagcgttatgctaaccagcgaagaagaaattaaaaccactaaccctgtagccacagaacaatacggtgtggtggctgataacttgcagcaaaccaatacggggcctattgtgggaaatgtcaacagccaaggagccttacctggcatggtctggcagaaccgagacgtgtacctgcagggtcccatctgggccaagattcctcacacggacggcaacttccacccttcaccgctaatgggaggatttggactgaagcacccacctcctcagatcctgatcaagaacacgccggtacctgcggatcctccaacaacgttcagccaggcgaaattggcttccttcattacgcagtacagcaccggacaggtcagcgtggaaatcgagtgggagctgcagaaggagaacagcaaacgctggaacccagagattcagtacacttcaaactactacaaatctacaaatgtggactttgctgtcaatacagagggaacttattctgagcctcgccccattggtactcgttacctcacccgtaatctg

SEQ ID NO: 179 - DNA, 2214 bp, Adeno-associated virus
atggctgccgatggttatcttccagattggctcgaggacaacctctctgagggcattcgcgagtggtgggacctgaaacctggagccccgaaacccaaagccaaccagcaaaagcaggacgacggccggggtctggtgcttcctggctacaagtacctcggacccttcaacggactcgacaagggggagcccgtcaacgcggcggacgcagcggccctcgagcacgacaaggcctacgaccagcagctcaaagcgggtgacaatccgtacctgcggtataatcacgccgacgccgagtttcaggagcgtctgcaagaagatacgtcttttgggggcaacctcgggcgagcagtcttccaggccaagaagcgggttctcgaacctctcggtctggttgaggaaggcgctaagacggctcctggaaagaagagaccggtagagccgtcaccacagcgttcccccgactcctccacgggcatcggcaagaaaggccagcagcccgccagaaagagactcaatttcggtcagactggcgactcagagtcagtccccgaccctcaacctatcggagaacctccagcagcgccctctagtgtgggatctggtacaatggctgcaggcggtggcgcaccaatggcagacaataacgaaggtgccgacggagtgggtagttcctcgggaaattggcattgcgattccacatggctgggcgacagagtcatcaccaccagcacccgaacctgggccctgcccacctacaacaaccacctctacaagcaaatctccaacgggacctcgggaggcagcaccaacgacaacacctactttggctacagcaccccctgggggtattttgactttaacagattccactgccacttctcaccacgtgactggcagcgactcatcaacaacaactggggattccggcccaagagactcagcttcaagctcttcaacatccaggtcaaagaggtcacgcagaatgaaggcaccaagaccatcgccaataacctcaccagcaccatccaggtgtttacggactcggaataccagctgccgtacgtcctcggctctgcccaccagggctgcctgcctccgttcccggcggacgtcttcatgattcctcagtacggctacctgactctcaacaacggtagtcaggccgtgggacgttcctccttctactgcctggagtacttcccctctcagatgctgagaacgggcaacaacttttccttcagctacactttcgaggacgtgcctttccacagcagctacgcgcacagccagagtttggacaggctgatgaatcctctcatcgaccagtacctgtactacctgtcaagaacccagtctacgggaggcacagcgggaacccagcagttgctgttttctcaggccgggcctagcaacatgtcggctcaggccagaaactggctgcctggaccctgctacagacagcagcgcgtctccacgacactgtcgcaaaacaacaacagcaactttgcctggactggtgccaccaagtatcatctgaacggcagagactctctggtgaatccgggcgtcgccatggcaaccaacaaggacgacgaggaccgcttcttcccatccagcggcatcctcatgtttggcaagcagggagctggaaaagacaacgtggactatagcaacgtgatgctaaccagcgaggaagaaatcaaggccaccaaccccgtggccacagaacagtatggcgtggtggctgataacctacagcagcaaaacaccgctcctattgtgggggccgtcaacagccagggagccttacctggcatggtctggcagaaccgggacgtgtacctgcagggtcctatttgggccaagattcctcacacagatggcaactttcacccgtctcctttaatgggcggctttggacttaaacatccgcctcctcagatcctcatcaaaaacactcctgttcctgcggatcctccaacagcgttcaaccaggccaagctgaattctttcatcacgcagtacagcaccggacaagtcagcgtggagatcgagtgggagctgcagaaggagaacagcaagcgctggaacccagagattcagtatacttccaactactacaaatctacaaatgtggactttgctgttaatactgagggtgtttactctgagcctcgccccattggcactcgttacctcacccgtaatctg

SEQ ID NO: 180 - DNA, 2211 bp, Adeno-associated virus
atggctgccgatggttatcttccagattggctcgaggacaacctctctgagggcattcgcgagtggtgggacctgaaacctggagcccccaagcccaaggccaaccagcagaagcaggacgacggccggggtctggtgcttcctggctacaagtacctcggacccttcaacggactcgacaagggggagcccgtcaacgcggcggacgcagcggccctcgagcacgacaaggcctacgaccagcagctcaaagcgggtgacaatccgtacctgcggtataaccacgccgacgccgagtttcaggagcgtctgcaagaagatacgtcttttgggggcaacctcgggcgagcagtcttccaggccaagaagcgggttctcgaacctctcggtctggttgaggaagctgctaagacggctcctggaaagaagagaccggtagaaccgtcacctcagcgttcccccgactcctccacgggcatcggcaagaaaggccagcagcccgctagaaagagactgaactttgggcagactggcgactcagagtcagtccccgaccctcaaccaatcggagaaccaccagcaggcccctctggtctgggatctggtacaatggctgcaggcggtggcgcaccaatggctgacaataacgagggcgccgacggagtgggtaatgcctcaggaaattggcattgcgattccacatggctgggcgacagagtcatcaccaccagcacccgaacctgggctttgcccacctacaacaaccacctctacaagcaaatctccagtcagtcagcaggtagcaccaacgacaacgtctacttcggctacagcaccccctgggggtattttgacttcaacagattccactgtcacttctcaccacgtgactggcagcggctcatcaacaacaactggggattccggcccaagaagctcaacttcaagctgttcaacatccaggtcaaggaggtcacaacgaatgacggcgtcacgaccatcgccaataaccttaccagcacggttcaggtcttttcggactcggaataccagctgccctacgtcctcggctccgcacaccagggctgcctgcctccgttcccggcggacgtcttcatgattccccagtacggctacctgactctgaacaatggcagccaatcggtgggtcgttcctctttctactgcctggaatatttcccttctcaaatgctgagaacgggcaacaacttcaccttcagctacaccttcgaggacgttcccttccacagcagctacgcacacagccagagcctggaccggctgatgaatcctcttatcgaccagtacctgtattacctggccagaacacagagcaacgcaggaggcacagctggcaatcgggaactgcagttttatcagggcgggcctaccaccatggccgaacaagccaaaaactggctgcctggaccttgcttccggcaacaaagagtctccaagacgctggatcaaaacaacaacagcaactttgcttggactggtgccaccaaataccatctaaatggaagaaattcattggttaatcccggtgtcgccatggcaacccacaaggacgacgaggaacgcttcttcccttcgagcggagtcctgatttttggaaaaactggagcagctaataagactacactggaaaatgtgttaatgacaaatgaagaggaaattcgtcctaccaacccggtagccaccgaggaatacgggactgttagcagcaacctgcaggcggctaacactgcagcccagacacaagttgtcaacaaccagggagccttacctggtatggtctggcagaaccgggacgtgtacctgcagggtcccatctgggccaagattcctcacacggacggcaactttcacccgtctccgctgatgggcggctttggactgaagcatccgcctcctcagatcctgatcaaaaacactcctgttcctgctaatcccccggaggtgtttacgcctgccaagtttgcttctttcatcacacagtacagcaccggccaggtcagcgtggagatcgagtgggagctgcagaaggagaacagcaagcgctggaacccagagattcagtatacctccaattttgacaaacagactggtgtggactttgccgttgacagccagggtgtttattctgagcctcgccccattggtactcgttacctcacccgtaatctg

SEQ ID NO: 181 - DNA, 2214 bp, Adeno-associated virus
atggctgccgatggttatcttccagattggctcgaggacaacctctctgagggcattcgcgagtggtgggacctgaaacctggagccccgaaacccaaagccaaccagcaaaagcaggacgacggccggggtctggtgcttcctggctacaagtacctcggacccttcaacggactcgacaagggggagcccgtcaacgcggcggacgcagcggccctcgagcacgacaaggcctacgaccagcagctcaaagcgggtgacaatccgtacctgcggtataatcacgccgacgccgagtttcaggagcgtctgcaagaagatacgtcttttgggggcaacctcgggcgagcagtcttccaggccaagaagcgggttctcgaacctctcggtctggttgaggaaggcgctaagacggctcctggaaagaagagaccggtagagccgtcaccacagcgttcccccgactcctccacgggcatcggcaagaaaggccagcagcccgccagaaagagactcaatttcggtcagactggcgactcagagtcagtccccgaccctcaacctatcggagaacctccagcagcgccctctagtgtgggatctggtacaatggctgcaggcggtggcgcaccaatggcagacaataacgaaggtgccgacggagtgggtagttcctcgggaaattggcattgcgattccacatggctgggcgacagagtcatcaccaccagcacccgaacctgggccctgcccacctacaacaaccacctctacaagcaaatctccaacgggacctcgggaggcagcaccaacgacaacacctactttggctacagcaccccctgggggtattttgactttaacagattccactgccacttctcaccacgtgactggcagcgactcatcaacaacaactggggattccggcccaagagactcagcttcaagctcttcaacatccaggtcaaagaggtcacgcagaatgaaggcaccaagaccatcgccaataacctcaccagcaccatccaggtgtttacggactcggaataccagctgccgtacgtcctcggctctgcccaccagggctgcctgcctccgttcccggcggacgtcttcatgattcctcagtacggctacctgactctcaacaacggtagtcaggccgtgggacgttcctccttctactgcctggagtacttcccctctcagatgctgagaacgggcaacaacttttccttcagctacactttcgaggacgtgcctttccacagcagctacgcgcacagccagagtttggacaggctgatgaatcctctcatcgaccagtacctgtactacctgtcaagaacccagtctacgggaggcacagcgggaacccagcagttgctgttttctcaggccgggcctagcaacatgtcggctcaggccagaaactggctgcctggaccctgctacagacagcagcgcgtctccacgacactgtcgcaaaacaacaacagcaactttgcctggactggtgccaccaagtatcatctgaacggcagagactctctggtgaatccgggcgtcgccatggcaaccaacaaggacgacgaggaccgcttcttcccatccagcggcatcctcatgtttggcaagcagggagctggaaaagacaacgtggactatagcaacgtgatgctaaccagcgaggaagaaatcaagaccaccaaccccgtggccacagaacagtatggcgtggtggctgataacctacagcagcaaaacaccgctcctattgtgggggccgtcaacagccagggagccttacctggcatggtctggcagaaccgggacgtgtacctgcagggtcctatttgggccaagattcctcacacagatggcaactttcacccgtctcctttaatgggcggctttggacttaaacatccgcctcctcagatcctcatcaaaaacactcctgttcctgcggatcctccaacagcgttcaaccaggccaagctgaattctttcatcacgcagtacagcaccggacaagtcagcgtggagatcgtgtgggagctgcagaaggagaacagcaagcgctggaacccagagattcagtatacttccaactactacaaatctacaaatgtggactttgctgttaatactgagggtgtttactctgagcctcgccccattggcactcgttacctcacccgtaatctg

SEQ ID NO: 182 - DNA, 2208 bp, Adeno-associated virus
atggctgccgatggttatcttccagattggctcgaggacaacctctctgagggcattcgcgagtggtgggacttgaaacctggagccccgaaacccaaagccaaccagcaaaagcaggacgacggccggggtctggtgcttcctggctacaagtacctcggacccttcaacggactcgacaagggggagcccgtcaacgcggcggacgcagcggccctcgagcacgacaaagcctacgaccagcagctcaaagcgggtgacaatccgtacctgcggtataatcacgccgacgccgagtttcaggagcgtctgcaagaagatacgtcttttgggggcaacctcgggcgagcagtcttccaggccaagaagcgggttctcgaacctctcggtctggttgaggaaggcgctaagacggctcctggaaagaagagaccggtagagcagtcgccacaagagccagactcctcctcgggcatcggcaagacaggccagcagcccgctaaaaagagactcaattttggtcagactggcgactcagagtcagtccccgacccacaacctctcggagaacctccagcagccccctcaggtctgggacctaatacaatggcttcaggcggtggcgctccaatggcagacaataacgaaggcgccgacggagtgggtaattcctcgggaaattggcattgcgattccacatggctgggggacagagtcatcaccaccagcacccgaacctgggccctgcccacctacaacaaccacctctacaagcaaatctccaacggcacctcgggaggaagcaccaacgacaacacctattttggctacagcaccccctgggggtattttgacttcaacagattccactgtcacttttcaccacgtgactggcaacgactcatcaacaacaattggggattccggcccaaaagactcaacttcaagctgttcaacatccaggtcaaggaagtcacgacgaacgaaggcaccaagaccatcgccaataatctcaccagcaccgtgcaggtctttacggactcggagtaccagttaccgtacgtgctaggatccgctcaccagggatgtctgcctccgttcccggcggacgtcttcatggttcctcagtacggctatttaactttaaacaatggaagccaagccctgggacgttcctccttctactgtctggagtatttcccatcgcagatgctgagaaccggcaacaactttcagttcagctacaccttcgaggacgtgcctttccacagcagctacgcgcacagccagagcctggacaggctgatgaatcccctcatcgaccagtacctgtactacctggtcagaacgcaaacgactggaactggagggacgcagactctggcattcagccaagcgggtcctagctcaatggccaaccaggctagaaattgggtgcccggaccttgctaccggcagcagcgcgtctccacgacaaccaaccagaacaacaacagcaactttgcctggacgggagctgccaagtttaagctgaacggccgagactctctaatgaatccgggcgtggcaatggcttcccacaaggatgacgaggaccgcttcttcccttcgagcggggtcctgatttttggcaagcaaggagccgggaacgatggagtggattacagccaagtgctgattacagatgaggaagaaatcaaggctaccaaccccgtggccacagaagaatatggagcagtggccatcaacaaccaggccgccaatacgcaggcgcagaccggactcgtgcacaaccagggggtgattcccggcatggtgtggcagaatagagacgtgtacctgcagggtcccatctgggccaaaattcctcacacggacggcaactttcacccgtctcccctgatgggcggctttggactgaagcacccgcctcctcaaattctcatcaagaacacaccggttccagcggacccgccgcttaccttcaaccaggccaagctgaactctttcatcacgcagtacagcaccggacaggtcagcgtggaaatcgagtgggagctgcagaaagaaaacagcaaacgctggaatccagagattcaatacacttccaactactacaaatctacaaatgtggactttgctgtcaacacggagggggtttatagcgagcctcgccccattggcacccgttacctcacccgcaacctg

SEQ ID NO: 183 - DNA, 2199 bp, Adeno-associated virus
atggctgccgatggttatcttccagattggctcgaggacaacctctctgagggcattcgcgagtggtgggacctgaaacctggagcccccaagcccaaggccaaccagcagaagcaggacgacggccggggtctggtgcttcctggctacaagtacctcggacccttcaacggactcgacaagggggagcccgtcaacgcggcggacgcagcggccctcgagcacgacaaggcctacgaccagcagctcaaagcgggtgacaatccgtacctgcggtataaccacgccgacgccgagtttcaggagcgtctgcaagaagatacgtcttttgggggcaacctcgggcgagcagtcttccaggccaagaagagggtactcgaacctctgggcctggttgaagaaggtgctaagacggctcctggaaagaagagaccgttagagtcaccacaagagcccgactcctcctcaggaatcggcaaaaaaggcaaacaaccagccaaaaagagactcaactttgaagaggacactggagccggagacggaccccctgaaggatcagataccagcgccatgtcttcagacattgaaatgcgtgcagcaccgggcggaaatgctgtcgatgcgggacaaggttccgatggagtgggtaatgcctcgggtgattggcattgcgattccacctggtctgagggcaaggtcacaacaacctcgaccagaacctgggtcttgcccacctacaacaaccacttgtacctgcggctcggaacaacatcaaacagcaacacctacaacggattctccaccccctggggatactttgactttaacagattccactgtcacttctcaccacgtgactggcaaagactcatcaacaacaactggggactacgaccaaaagccatgcgcgttaaaatcttcaatatccaagttaaggaggtcacaacgtcgaacggcgagactacggtcgctaataaccttaccagcacggttcagatatttgcggactcgtcgtatgagctcccgtacgtgatggacgctggacaagagggaagtctgcctcctttccccaatgacgtcttcatggtgcctcaatatggctactgtggcattgtgactggcgaaaatcagaaccagacggacagaaatgctttctactgcctggagtattttccttcacaaatgctgagaactggcaataactttgaaatggcttacaactttgagaaggtgccgttccactcaatgtatgctcacagccagagcctggacagactgatgaatcccctcctggaccagtacctgtggcacttacagtcgaccacctctggagagactctgaatcaaggcaatgcagcaaccacatttggaaaaatcaggagtggagactttgccttttacagaaagaactggctgcctgggccttgtgttaaacagcagagattctcaaaaactgccagtcaaaattacaagattcctgccagcgggggcaacgctctgttaaagtatgacacccactataccttaaacaaccgctggagcaacatagcgcctggacctccaatggcaacagctggaccttcagatggggacttcagcaacgcccagctcatcttccctggaccatcagtcaccggaaacacaacaacctcagcaaacaatctgttgtttacatcagaagaagaaattgctgccaccaacccaagagacacggacatgtttggtcagattgctgacaataatcagaatgctacaactgctcccataaccggcaacgtgactgctatgggagtgcttcctggcatggtgtggcaaaacagagacatttactaccaagggccaatttgggccaagatcccacacgcggacggacattttcatccttcaccgctaattggcggttttggactgaaacatccgcctccccagatatttatcaaaaacacccccgtacctgccaatcctgcgacaaccttcactgcagccagagtggactctttcatcacacaatacagcaccggccaggtcgctgttcagattgaatgggaaatcgaaaaggaacgctccaaacgctggaatcctgaagtgcagtttacttcaaactatgggaaccagtcttctatgttgtgggctcccgatacaactgggaagtatacagagccgcgggttattggctctcgttatttgactaatcatttg

SEQ ID NO: 184 - DNA, 1338 bp, Adeno-associated virus
gacttcaaccgcttccacagccacttctcgccgcgagactggcagcggctcatcaacaacaactgggggttccggcccaagcgactcaacttcaagctgttcaacatccaagtcaaggaagttacggacacggacggcacgaagaccatcgccaataaccttaccagcacggttcaggtctttgcggattcggagtaccagctcccgtacgtcctcggatcagcgcaccagggctgcttcccgccgttcccggcggacgtcttcatggtcccgcagtacgggtatttgacgctgaacaacggcagccaggcgatgggtcgctcgtccttctactgcctggagtactttccgtcgcagatgctgcggacggggaacaacttcacgttcagctacaccttcgaggacgtgcccttccacagcagctacgcgcacagccagagtctggaccggctcatgaacccactcatcgaccagtacctgtactacctaagcaagacaaatgacggtctaggattttcccaagcgggacccaacagcatgcgcgaccagtccaggaattggctgccgggaccctgcttcagacaacaacggatttcaactgtacctacacaaaataacaacggagacttttcgtggacgggagccacaaagtatcatctcaatggaagaaactcagcaatgaatcccggcccggccatggccagccacaaagacgacgaacacagattcttccctcagaacggtgtgctcatctttggaaaacagggcgcagacaagacaaatgcgatactagaaaaagtgatcgttacagacgaagaggagattaggacaacaaatcctgtagccacggaagagtatgggtttgtcgccactaatctacaaagctcggcagaaacagccgagaccgaaagagtcaacgcgcaaggcatcctccctggcatggtgtggcaagaccgagatgtgtatctgcaggggcccatctgggccaagatcccccacaccgacggacacttccacccctcaccactcatgggaggattcggcctcaagcacccgcctccgcagatcctcatcaagaacacgcctgtgccttcgaatcctccagagacgttcaacccggaaaagctcaattctttcataactcaatattctacgggccaggtcagcgtggagatcgagtgggagctgcagaaggagaacagcaagcgctggaaccccgaggtccagtacacgtccaactacaacaagtctgttaatgtggacttcaccgtggacaccaacggtgtgtactcggaaccgcgcaccatcggcacccgataccttacccgcaacctgtaa

SEQ ID NO: 185 - DNA, 1500 bp, Adeno-associated virus
gattccacatggctggacaagcgagtcattaccaagtccacccgaacctggagcctgcccacctacaacaaccacctctacaacaaaatcacctccaccgcagcaaatggagacggaacctggttcggattcagcactccatggggatactttgacttcaaccgcttccactgccatttctcaccccgagactggcagcgactcatcaacaacaactggggcatccggcccaagaaaatgcacgtcaaactcttcaatatccaagtcaaggaagtcacgacgcaagactcgacgacgaccatcaccaataaccttaccagcacgattcaggtgtttgcggacacggagtaccagctgccgtacgtagccagcaacgcccacgagggctgcctcccgccctttccggcggacgtcttcatgcttccgcagtatggctactgcacgctgcaacgcgagaactccaacgatcccgtggcccaaagctcgttctactgcctggagtacttccccagtcagatgctggggaccggaaacaactactccatcagctacacgttcgaagacgtacccttccacagcatgtacatgcacaatcagagcctggaccggctgatgaacccgctcatcgaccagtacctgtggttcctcaataataccgtagccaccaacaacaccaacaccttcaccaagtcgaccaaagacgatttgccacgccagaatcgcaattggctacccggacccgccttccagacggcggccttcaacttgaacggtcagaaccattttttcacgtccaatcactggggtttagttaacaagtacttgatgaatggaagaaacgtggcgattggccctggccctgtcgtagcccccaaaagcacgaccttccaggccgacggcatgatcttcgccaaaagcgcagctacggcgacatctgctgccgctcaagatacggtcaacatcaccagcgagtcggagacgtccaccgtcaaccccatgatgggcaccaaccctctcattatcaattcgagtaatactccatctacttccgcccccacgatgtcgaatcaagccgtcaatcccatcatgcctggctccgtttggcaagacagagacatctatcttcagggcccgatctgggccaagattccgcgcaccgatggaaccttccacccctcgcctctgatgggaggtttcgggctgcgtcatcctcctccacaaatcttcatcaagaacacacccgttccggccaaccctccaaccacgttcaatcccgccaaaatcaacgccttcatcacccaatactcgactggacaggtcaccgtcgagatggaatgggagctcgagaaggaaaacagcaagcgatggaacccggaaatccagttcaccaacaacttccaggtttcggacgggaacatggttcccttctgcgtggactcaaatggcgtctactccgaaccacgccccatcggaacccgctacctcacccgaaccctctaa

SEQ ID NO: 186 - DNA, 2209 bp, Caprine adeno-associated virus
atgtcttttgttgatcaccctccagattggttggaagaagttggtgaaggtcttcgcgagtttttgggccttgaagcgggcccaccgaaaccaaaacccaatcagcagcatcaagatcaagcccgtggtcttgtgctgcctggttataactatctcggacccggaaacggtctcgatcgaggagagcctgtcaacagggcagacgaggtcgcgcgagagcacgacatctcgtacaacgagcagcttgaggcgggagacaacccctacctcaagtacaaccacgcggacgccgagtttcaggagaagctcgccgacgacacatccttcgggggaaacctcggaaaggcagtctttcaggccaagaaaagggttctcgaaccttttggcctggttgaagagggtgctaagacggcccctaccggaaagcggatagacgaccactttccaaaaagaaagaaggctcggaccgaagaggactccaagccttccacctcgtcagacgccgaagctggacccagcggatcccagcagctgcaaatcccagcacaaccagcctcaagtttgggagctgatacaatgtctgcgggaggtggcggcccattgggcgacaataaccaaggtgccgatggagtgggcaatgcctcgggagattggcattgcgattccacgtggatgggggacagagtcgtcaccaagtccacccgcacctgggtgctgcccagctacaacaaccaccagtaccgagagatcaaaagcggctccgtcgacggaagcaacgccaacgcctactttggatacagcaccccctgggggtactttgactttaaccgcttccacagccactggagcccccgagactggcaaagactcatcaacaactattggggcttcagaccccggtctctcagagtcaaaatcttcaacatccaagtcaaagaggtcacggtgcaggactccaccaccaccatcgccaacaacctcacctccaccgtccaagtgtttacggacgacgactaccaactcccgtacgtcgtcggcaacgggaccgagggatgcctgccggccttccccccgcaggtctttacgctgccgcagtacggctacgcgacgctgaaccgagacaacggagacaacccgacagagcggagcagcttcttttgcctagagtactttcccagcaagatgctgaggacgggcaacaactttgagtttacctacagctttgaagaggtgcccttccactgcagcttcgccccgagccagaacctctttaagctggccaacccgctggtggaccagtacctgtaccgcttcgtgagcacctcggccacgggcgccatccagttccaaaagaacctggcgggcagatacgccaacacctacaaaaactggttcccggggcccatgggccgaacccagggctggaacacgagctctggcagcagcaccaacagagtcagcgtcaacaacttttccgtctcaaaccggatgaacctggagggggccagctaccaagtgaacccccagcccaacgggatgacaaacacgctccaaggcagcaaccgctacgcgctggaaaacaccatgatcttcaacgctcaaaacgccacgccgggaactacctcggtgtacccagaggacaatctactgctgaccagcgagagcgagactcagcccgtcaaccgggtggcttacaacacgggcggtcagatggccaccaacgcccagaacgccaccacggctcccacggtcgggacctacaacctccaggaagtgcttcctggcagcgtatggatggagagggacgtgtacctccaaggacccatctgggccaagatcccagagacgggggcgcactttcacccctctccggccatgggcggattcggactcaaacacccgccgcccatgatgctcatcaaaaacacgccggtgcccggcaacatcaccagcttctcggacgtgcccgtcagcagcttcatcacccagtacagcaccgggcaggtcaccgtggagatggaatgggagctcaaaaaggaaaactccaagaggtggaacccagagatccagtacaccaacaactacaacgacccccagtttgtggactttgctccagacggctccggcgaatacagaaccaccagagccatcggaacccgatacctcacccgacccctttaacccattcatgtcgcataccctcaataaa

SEQ ID NO: 187 - DNA, 447 bp, Bat adeno-associated virus
ctgcccacctacaacaaccacctctacaaacagatcaactcaaataccagcgacgccaaagaaacctactttggctacagcactccttgggggtattttgacttcaaccggttccactgtcacttctcgccgagggactggcaacgcctcatcaacaaccactggggcatgcgacccaaaagactcaactttaaactgtttaacatccaagtcaaagaggtcacgacgaacgacggtacgaagacgatcgcgaacaaccttacctcgacggtgcaagtctttgcggactcggagtaccaactcccctacgtgctaggaaacgctcacgagggctgctttccaccgtttccagcggacgtcttcatgctgccacaatacggatatctgactctcaattcgaacgacaacaaagccatgccacagagttccttctactgcctggaatac

SEQ ID NO: 188 - DNA, 462 bp, Bat adeno-associated virus
ctgcccgcctacaacaaccacctctaccgccagatccagtccagcggcaccggagacggcacgtactttggttacagcacgccttggggatacttcgatttcaatcgattccactgccacttttctcccagggactggcagcggctcatcaacaaccactggggcatccgccccaagcggctccactttaagctcttcaacatccaggtcaaggaggtcacgacgaccgacggcaccacgaccatcgccaacaacctcaccagcaccatacaggtctttgcggacacggagtaccagctcccgtacgtgctcggcaacgcccacgagggctgcctgccgccgttcccggcggacgtcttcatgctgccgcagtacgcgtacctgacgctcaacgccaacccgacgaaccagggcgcggccgcgctcagcctgccgcagagcgccttctactgcctagaatac

SEQ ID NO: 189 - DNA, 447 bp, Bat adeno-associated virus
ctgcccacctacaacaaccacctctacaaacagatcaactcaaataccagcgacgccaaagaaacctactttggctacagcactccttgggggtattttgacttcaaccggttccactgtcacttctcgccgagggactggcaacgcctcatcaacaaccactggggcatgcgacccaaaagactcaactttaaactgtttaacatccaagtcaaagaggtcacgacgaacgacggtacgaagacgatcgcgaacaaccttacctcgacggtgcaagtctttgcggactcggagtaccaactcccctacgtgctaggaaacgctcacgagggctgctttccaccgtttccagcggacgtcttcatgctgccacaatacggatacctgactctaaactcgaacgacaacaaagccatgccacagagttccttctactgcctggaatac

SEQ ID NO: 190 - DNA, 447 bp, Bat adeno-associated virus
ctgcccacctacaacaaccacctctacaaacagatcaactcaaataccagcgacgccaaagaaacctactttggctacagcactccttgggggtattttgacttcaaccggttccactgtcacttctcgccgagggactggcaacgcctcatcaacaaccactggggcatgcgacccaaaagactcaactttaaactgtttaacatccaagtcaaagaggtcacgacgaacgacggtacgaagacgatcgcgaacaaccttacctcgacggtgcaagtctttgcggactcggagtaccaactcccctacgtgctaggaaacgctcacgagggctgctttccaccgtttccagcggacgtcttcatgctgccacaatacggatacctgactctcaattcgaacgacaacaaagccatgccacagagttccttctactgcctggaatac

SEQ ID NO: 191 - DNA, 462 bp, Bat adeno-associated virus
ctgcccacctacaacaaccacctctaccgccagatccagtccagcggcaccggagacggcacgtactttggttacagcacgccttggggatacttcgatttcaatcgattccactgccacttttctcccagggactggcagcggctcatcaacaaccactggggcatccgccccaagcggctccactttaagctcttcaacatccaggtcaaggaggtcacgacgaccgacggcaccacgaccatcgccaacaacctcaccagcaccatacaggtctttgcggacacggagtaccagctcccgtacgtgctcggcaacgcccacgagggctgcctgccgccgttcccggcggacgtcttcatgctgccgcagtacgcgtacctgacgctcaacgccaacccgacgaaccagggcgcggccgcgctcagcctgccgcagagcgccttctactgcctagaatac

SEQ ID NO: 192 - DNA, 456 bp, Bat adeno-associated virus
ctgcccacctacaacaaccacctgtacaagcagatcaacggcaccggaaccggggacgcggtgtactttggttacagcacgccttggggatacttcgatttcaatcgattccactgccacttttctccccgagactggcagcgcctcgtcaacaaccactggggcatccgcccccgaaggctcatcttcaagctcttcaacatccaggtcaaggaggtcacgacgacggacggcaccaagaccatcgccaataacctcacgtccaccgtccaggtgtttgcggacacggagcaccagctcccgtacatcctaggctccgcgcacgagggctgcatgccgcccttccccgcggacgtgttcatgctgccgcagtacggctacctcacgctcaacgggcccggcaccaacaacaacaacctcagcacgccctctagcgccttctactgcctagagtac

SEQ ID NO: 193 - DNA, 456 bp, Bat adeno-associated virus
ctgcccacctacaacaaccacctgtacaagcagatcaacggcaccggcaccggagacggcacgtactttggttacagcacgccttggggatacttcgatttcaatcgattccactgccacttttctccccgagactggcagcgcctcgtcaacaaccactggggcatccgcccccgaaggctcatcttcaagctcttcaacatccaggtcaaggaggtcacgacgacggacggcaccaagaccatcgccaataacctcacgtccaccgtccaggtgtttgcggacacggagcaccagctcccgtacatcctaggctccgcgcacgagggctgcatgccgcccttccccgcggacgtgttcatgctgccgcagtacggctacctcacgctcaacgggcccggcaccaacaacaacaacctcagcacgccctcgagcgccttctactgcctagaatac

SEQ ID NO: 194 - DNA, 456 bp, Bat adeno-associated virus
ctgcccacctacaacaaccacctgtacaagcagatcaacggcaccggaaccggggacggggtgtactttggttacagcacgccttggggatacttcgatttcaatcgattccactgccacttttctccccgagactggcagcgcctcgtcaacaaccactggggcatccgcccccgaaggctcatcttcaagctcttcaacatccaggtcaaggaggtcacgacgacggacggcaccaagaccatcgccaataacctcacgtccaccgtccaggtgtttgcggacacggagcaccagctcccgtacatcctaggctccgcgcacgagggctgcatgccgcccttccccgcggacgtcttcatgctgccgcagtacggctacctcacgctcaacgggcccggcaccaacaacaacaacctcagcacgccctcgagcgccttctactgcctagaatac

SEQ ID NO: 195 - DNA, 456 bp, Bat adeno-associated virus
ctgcccacctacaacaaccacctgtacaagcagatcaacggcaccggcaccggggacgcggtgtactttggttacagcacgccttggggatacttcgatttcaatcgattccactgccacttttctccccgagactggcagcgcctcgtcaacaaccactggggcatccgcccccgaaggctcagcttcaagctcttcaacatccaggtcaaggaggtcacgacgacggacggcaccaagaccatcgccaataacctcacgtccaccgtccaggtgtttgcggacacggagcaccagctcccgtacatcctaggctccgcgcacgagggctgcatgccgcccttccccgcggacgtgttcatgctgccgcagtacggctacctcacgctcaacgggcccggcaccaacaacaacaacctcagcacgccctctagcgccttctactgcctagaatac

SEQ ID NO: 196 - DNA, 456 bp, Bat adeno-associated virus
ctgcccacctacaacaaccacctgtacaagcagatcaacggcaccggcaccggggacgcggtgtactttggttacagcacgccttggggatacttcgatttcaatcgattccactgccacttttctccccgagactggcagcgcctcgtcaacaaccactggggcatccgcccccgaaggctcagcttcaagctcttcaacatccaggtcaaggaggtcacgacgacggacggcaccaagaccatcgccaataacctcacgtccaccgtccaggtgtttgcggacacggagcaccagctcccgtacatcctaggctccgcgcacgagggctgcatgccgcccttccccgcggacgtgttcatgctgccgcagtacggctacctcacgctcaacgggcccggcaccaacaacaacaacctcagcacgccctcgagcgccttctactgcctagaatac

SEQ ID NO: 197 - DNA, 444 bp, Bat adeno-associated virus
ctgcccagctacaacaaccaccgctacaagcaaatcaactcttcgtcagaaggagtcgacgaggcctactttggctacagcaccccgtggggatactttgactttaaccgcttccactgccacttttcaccccgagactggcagcgcctcatcaacaaccattggggcatccgtccaaagagcctcaactttaagctcttcaacatccaggtcaaggaggtcacaacgaacgacggaacgacaacgatcgccaataacctcacgtcaaccgtgcaggtgtttgcggacaccgagtaccagttgccctacatcctgggcaacgcgcacgagggctgcctcccaccgttcccagcggacgtgttcatgctgccgcagtacggatacctcacactgaacaagtctcacgatgcactggctcagggatccttctactgcctagaatac

SEQ ID NO: 198 - DNA, 444 bp, Bat adeno-associated virus
ctgcccacctacaacaaccacctctacaagcaaatcaattccaattcggatgtcaccgacgaaaagtactttggatacagtaccccgtggggatactttgactttaaccgcttccactgccacttttcaccccgagactggcagcgcctcatcaacaaccattggggtatgcgcccgaagaggctcaactttaagctgttcaacatccaggttaaggaggtcacgacgaacgacggcaccacgacaatcgccaacaatctcacgtctaccgtccagattttcgccgacagcgagtaccagttgccgtacgtgctcgggaatgcgcacgagggctgcctcccgccgttcccggcagatgtgttcatgctgccgcagtacgggtacctcacgttgaacgacggaaatcaagtgattccacaaagttccttctactgcctagaatac

SEQ ID NO: 199 - DNA, 444 bp, Bat adeno-associated virus
ctgcccacctacaacaaccacctctacaagcaaatcaactcaagttccgacgtcaccgacgaaaagtactttggctacagcaccccgtggggatactttgattttaaccgcttccactgccacttttcaccccgagactggcagcgcctcatcaacaaccactggggtatgcgcccaaagaggctcaactttaagctgttcaacatccaggtcaaggaggtcacgacgaacgacggcaccacgaccatcgccaacaacctcacgtctaccgtccagattttcgccgacagcgagtaccagctgccgtacgtgctcgggaatgcgcacgagggctgcctcccgccgttcccggcagatgtgtttatgctgccgcagtacgggtatctcacgctaaacgacggaaaccaagttattccgcagagttccttctactgcctagaatac

SEQ ID NO: 200 - DNA, 462 bp, Bat adeno-associated virus
ctgcccacctacaacaatcacctctacaagcagatgcagtcaacaggaaccggagacggcacctactacggttacagcacgccttggggatactttgatttcaatcgattccactgccacttttctccccgcgactggcagcgcctcatcaacaaccactggggcatccgcccaaagaaactcaactttaagctcttcaacatccaggtcaaggaggtcacaacgactgacggaacgacgacgatcgccaataacctcacaagcaccgtccaggtctttgcggaccaggagtaccagctcccgtacgtgctaggcaacgcccacgagggctgcctgccgccgtttccggctgacgtatttatgctgccgcagtacgggtacctcacgctcaactcgaaccccaccgcgcagggccagaacgccctctcgctgccgcagagcgccttctactgcctagaatac

SEQ ID NO: 201 - DNA, 462 bp, Bat adeno-associated virus
ctgcccacctacaacaatcacctctacaagcaaatgcagtcaacgggaaccggagacggcacctactacggttacagcacgccttggggatactttgatttcaatcgattccactgccacttttctccccgcgactggcagcgcctcatcaacaaccactggggcatccgcccaaagaaactcaactttaagctcttcaacatccaggtcaaggaggtcacaacgactgacggaacgacgacgatcgccaataacctcacaagcaccgtccaggtctttgcggaccaggagtaccagctcccgtacgtgctaggcaacgcccacgaaggctgcctgccgccgtttccggctgacgtgtttatgctgccgcagtacgggtacctcacgctcaactcgaacccgacatcgcagggccagaacgccctgtctctgccgcagagcgccttctactgcctagaatac

SEQ ID NO: 202 - DNA, 462 bp, Bat adeno-associated virus
ctgcccacctacaacaaccacctctacaagcagatgcagtcaacgggaaccggagacggcacctactacggttacagcacgccttggggatactttgatttcaatcgattccactgccacttttctccccgcgactggcagcgcctcatcaacaaccactggggcatccgcccaaagaaactcaactttaagctcttcaacatccaggtcaaggaggtcacaacgactgacggaacgacgacgatcgccaataacctcacaagcaccgtccaggtctttgcggaccaggagtaccagctcccgtacgtgctaggcaacgcccacgagggctgcctgccgccgtttccggctgacgtgtttatgctgccgcagtacgggtacctcacgctcaactcgaaccccaccgcgcagggccagaacgccctctcgctgccgcagagcgccttctactgcctagaatac

SEQ ID NO: 203 - DNA, 462 bp, Bat adeno-associated virus
ctgcccacctacaacaatcacctctacaagcaaatgcagtcaacgggaaccggagacggcacctactacggttacagcacgccttggggatactttgatttcaatcgattccactgccacttttctccccgcgactggcagcgcctcatcaacaaccactggggcatccgcccaaagaaactcaactttaagctcttcaacatccaggtcaaggaggtcacaacgactgacggaacgacgacgatcgccaataacctcacaagcaccgtccaggtctttgcggaccaggagtaccagctcccgtacgtgctaggcaacgcccacgagggctgcctgccgccgtttccggctgacgtgtttatgctgccgcagtacgggtacctcacgctcaactctaaccccaccgcgcagggccaaaacgccctctcgctgccgcagagcgccttctactgcctagaatac

SEQ ID NO: 204 - DNA, 453 bp, Bat adeno-associated virus
ctgcccacctataacaaccacgtctaccagcaaatcaactccaccaccggaggaaacggaacctactttggatacagcaccccctgggggtactttgacttcaaccgcttccactgccacttttctccccgagactggcagcgcctcatcaacaaccactggggcatgcgccccaagcggctcaactttaagctcttcaacatccaagtcaaggaggtcacgacgaacgacggcacgacgtccatcgccaataacctcacctccaccgtccaggtgtttgcggactcggagtaccagctcccgtacgtgctaggcaacgcccaggagggcaccttcccgcccttcccggccgacgtctttatgctcccgcagtacggctacctcacgctcaacgacaactcccagagcgcggccaaggccctgccgcagagcgccttctactgcctagaatac

SEQ ID NO: 205 - DNA, 453 bp, Bat adeno-associated virus
ctgcccacctacaacaaccacgtctaccagcaaatcaactccaccaccggaggaaacggaacctactttggatacagcaccccctgggggtactttgacttcaaccgcttccactgccacttttctccccgagactggcagcgcctcatcaacaaccactggggcatgcgccccaagcggctcaactttaagctcttcaacatccaagtcaaggaggtcacgacgaacgacggcacgacgtccatcgccaataacctcacctccaccgtccaggtctttgcggactcggagtaccagctcccgtacgtgctaggcaacgcccaggagggcaccttcccgcccttcccggccgacgtctttatgctcccgcagtacggctacctcacgctcaacgacaactcccagagcgcggccaaggccctgccgcagagcgccttctactgcctagaatac

SEQ ID NO: 206 - DNA, 456 bp, Bat adeno-associated virus
ctgcccacctacaacaaccacctgtacaagcagatcaacggcagcggaaccggggacgcggtgtactttggttacagcacgccttggggatacttcgatttcaatcgattccactgccacttttctccccgagactggcagcgcctcgtcaacaaccactggggcatccgcccccgaaggctcaacttcaagctcttcaacatccaagtcaaggaggtcacgacgacggacggcaccaagaccatcgccaataacctcacgtccaccgtccaggtgtttgcggacacggagcaccagctcccgtacatcctaggctccgctcacgagggctgcatgccgcccttccccgcggacgtcttcatgctgccgcagtacggctacctcacgctcaacgggcccggcagcaacaacaacaacctcagcacgccctcgagcgccttctactgcctagaatac

SEQ ID NO: 207 - DNA, 453 bp, Bat adeno-associated virus
ctgcccacctacaacaaccacgtctaccagcaaatcaactccaccaccggaggcaacggaacctactttggatacagcaccccctgggggtactttgactttaaccgattccactgccacttttcgccccgagactggcagcgactcatcaacaaccactggggcatgcgacccaagcgactcaactttaagctcttcaacatccaagttaaggaggtcacgacgaacgacggcacaacgtccatcgccaataacctcacgtccaccgtgcaggtctttgcggactcggagtaccagctcccgtacgtgctaggcaacgctcaggaaggaacgttccctcctttcccggccgacgtctttatgctgccgcagtacgggtaccttacgctcaacgacaacacacagaacggagccagagcgctgcctcagagcgccttctactgcctagaatac

SEQ ID NO: 208 - DNA, 456 bp, Bat adeno-associated virus
ctgcccacctacaacaaccacctgtacaagcagatcaacggcagcggcaccggagacggcacgtactttggttacagcacgccttggggatacttcgatttcaatagattccactgccacttttctccccgagactggcagcgcctcgtcaacaaccactggggcatccgcccccgaaggctcaacttcaagctcttcaacatccaggtcaaggaggtcacgacgacggacggcaccaagaccatcgccaataacctcacgtccaccgtccaggtgtttgcggacacggagcaccagctcccgtacatcctaggctccgcgcacgagggctgcatgccgcccttccccgcggacgtcttcatgctgccgcagtacggctacctcacgctcaacgggcccggcaccaacaacaacaacctcagcacgccctccagcgccttctactgcctagaatac

SEQ ID NO: 209 - DNA, 444 bp, Bat adeno-associated virus
ctgcccacctacaacaaccagcagtacaagcgcatggactcaaagggagccaccagcaaggacaatttctacagctactctactccgtggggatactttgactttaaccgcttccagtaccacttttcaccccgagactggcagtgcttcgtcaacaacaattggggtatctggcccaagagacttctcttcaagctgttcaacgtccaggttaaggaggtcactacgcaggagggaaccacgaccatcaccaataacctcactagcaccatccaggtctttgcggactcggactaccagttcccgcacgtgctaggccatgcgcacgagggaacgctgccttccttcccggcccacgtcttcaccgtcccccagttcgcctactacacgttcaacaacggggacaacaccgcagctcgcagcaccttctactgcctagaatac

SEQ ID NO: 210 - DNA, 456 bp, Bat adeno-associated virus
ctgcccacctacaacaaccacctgtacaagcagatcaacggcaccggcaccggagacggcacgtactttggttacagcacgccttggggatacttcgatttcaatcgattccactgccacttttctccccgagactggcagcgcctcgtcaacaaccactggggcatccgcccccgaaggctcaacttcaagctcttcaacatccaggtcaaggaggtcacgacgacggacggcaccaagaccatcgccaataacctcacgtccaccgtccaggtgtttgcggacacggagcaccagctcccgtacatcctaggctccgcgcacgagggctgcatgccgcccttccccgcggacgtgttcatgctgccgcagtacggctacctcacgctcaacgggcccggcaccaacaacaacaacctcagcacgccctcgagcgccttctactgcctagaatac

SEQ ID NO: 211 - DNA, 456 bp, Bat adeno-associated virus
ctgcccacctacaacaaccacctgtacaagcagatcaacggcaccggcaccggagacggcacgtactttggttacagcacgccttggggatacttcgatttcaatcgattccactgccacttttctccccgagactggcagcgcctcgtcaacaaccactggggcatccgcccccgaaggctcatcttcaagctcttcaacatccaggtcaaggaggtcacgacgacggacggcaccaagaccatcgccaataacctcacgtccaccgtccaggtgtttgcggacacggagcaccagctcccgtacatcctaggctccgcgcacgagggctgcatgccgcccttccccgcggacgtgttcatgctgccgcagtacggctacctcacgctcaacgggcccggcaccaacaacaacaacctcagcacgccctcgagcgccttctactgcttagaatac

SEQ ID NO: 212 - DNA, 462 bp, Bat adeno-associated virus
ctgcccacctacaacaaccacatctaccgacagatacagtcctccggtaccggagacggcacctactttggttacagtacgccatggggatactttgatttcaatcgattccactgccacttttctccccgagactggcaacgactcatcaacaaccactggggcatccggcccaagcgactcaactttaagctgttcaacatccaggtcaaggaggtcacgacgaatgacggcacgacaacgatcgccaataacctcacgtccaccgtccaggtgtttgcggactcggactatcagctcccgtacgtgctaggaaacgcccacgagggctgtttcccgccatttcccgctgacgtgtttatgctgccacagtttggctacctgaccttgaatgcgacccctccgacccaaggacaagcggcactgagtatgcctcagagtgccttctactgcctagaatac

SEQ ID NO: 213 - DNA, 444 bp, Bat adeno-associated virus
ctgcccacctacaacaaccaccagtacaagcccatcgactcgaagggcgccaccagcaaggacaatttctacagctactccactccatggggatactttgactttaaccgcttccggtaccacttttcaccccgagactggcagtgcttcttcaacaccaattggggtatcaggcccaagagaccttccttcaagctgttcaacgtccaggttaaggaggtcactaggcaggagggagccacgaccatcaccaataacctcaccagcaccatccaggtctttgtggactcggactaccagttcccgcctgtgctaggcaccgcgcacgagggaatgctgcctcccttcccggccgacgtcttcactgtcccccagtacgcctactacacgctcaacaacggggacaacaccgcagctcgcagcaccttctactgcctagaatac

SEQ ID NO: 214 - DNA, 444 bp, Bat adeno-associated virus
ctgcccacctacaacaaccgccagtacaagcgcatcgactcaaacggagccaccagcaaggacagattctacagctactctactccatggggatactttgactttaatgacttccggtaccacttttcaccccgagactggcagtgcttcgtcaacaacaattggggtatctggcccaagggaccttccttcaagctgttcaacatccaggttaaggagctcactacgcaggagggagccacggccatcaccaatagcctcaccagcaccatccaggtctttgcggactcggactaccagttcccacacgtgctaggcaacgcgcacgagggaacgctgccccccttcccggccgacgtcttcaccgtcccccagtacgcctactacacgctcaaccacggggacagcgccacagctcgcagcaccttctactgcctagaatac

SEQ ID NO: 215 - DNA, 444 bp, Bat adeno-associated virus
ctgcccacctacaacaaccacctctacaagcaaatcaattccaactcggatgtcaccgacgaaaagtactttggatacagtaccccgtggggatactttgactttaaccgcttccactgccacttttcaccccgagactggcagcgcctcatcaacaaccattggggtatgcgcccgaagaggctcaactttaagctgttcaacatccaggttaaggaggtcacgacgaacgacggcaccacgacaatcgccaacaatctcacgtctaccgtccagattttcgccgacagcgagtaccagttgccgtacgtgctcgggaatgcgcacgagggctgcctcccgccgttcccggcagatgtgttcatgctgccgcagtacgggtacctcacgttgaacgacggaaatcaagtgattccacaaagttccttctactgcctagaatac

SEQ ID NO: 216 - DNA, 453 bp, Bat adeno-associated virus
ctgcccacctacaacaaccacgtctaccagcaaatcaactccaccaccggaggaaacggaacctactttggatacagcaccccctgggggtactttgacttcaaccgcttccactgccacttttctccccgagactggcagcgcctcatcaacaaccactggggcatgcgccccaagcggctcaactttaagctcttcaacatccaagtcaaggaggtcacgacgaacgacggcacgacgtccatcgccaataacctcacctccaccgtccaggtgtttgcggactcggagtaccagctcccgtacgtgctaggcaacgcccaggagggcaccttcccgcccttcccggccgacgtctttatgctcccgcagtacggctacctcacgctcaacgacaactcccagagcgcggccaaggccctgccgcagagcgccttctactgcctagaatac

SEQ ID NO: 217 - DNA, 444 bp, Bat adeno-associated virus
ctgcccacctacaacaaccacctctacaagcaaatcaactcaagctcagacgtcaacgacgaaaagtactttggatacagcaccccgtggggatattttgactttaaccgcttccactgccacttttcaccccgagactggcagcgcctcatcaacaaccactggggcatgcgcccgagaagactcaactttaagctttttaacatccaggttaaggaagtcaccacgaacgacggaaccacgaccatcgccaataacctcacgtcgaccgtccagattttcgccgacagcgagtaccagctgccgtacgtgctcgggaatgcgcacgagggctgcctcccgccgttcccggcagacgtgttcatgctgccgcagtacgggtacctcacgctgaacgacggaaaccaagtgattccgcagagctccttctactgcctagaatac

SEQ ID NO: 218 - DNA, 456 bp, Bat adeno-associated virus
ctgcccacctacaacaaccacctgtacaagcagatcaacggcagcggaaccggggacggcatgtactttggttacagcacgccttggggatacttcgatttcaatcgattccactgccacttttctccccgagactggcagcgcctcgtcaacaaccactggggcatccgcccccgaaggctcaacttcaagctcttcaacatccaggtcaaggaggtcacgacgacggacggcaccaagaccatcgccaataacctcacgtccaccgtccaggtgtttgcggacacggagcaccagctcccgtacatcctaggctccgcgcacgagggctgcatgccgcccttccccgcggacgtcttcatgctgccgcagtacggctacctcacgctcaacgggcccggcaccaacaacaacaacctcagcacgccctcgagcgccttctactgcctagaatac

SEQ ID NO: 219 - DNA, 456 bp, Bat adeno-associated virus
ctgcccacctacaacaaccacctgtacaagcagatcaacggcagcggcaccggagacggcacgtactttggttacagcacgccttggggatacttcgatttcaatcgattccactgccacttttctccccgagactggcagcgcctcgtcaacaaccactggggcatccgcccccgaaggctcaacttcaagctcttcaacatccaggtcaaggaggtcacgacgacggacggcaccaagaccatcgccaataacctcacgtccaccgtccaggtgtttgcggacacggagcaccagctcccgtacatcctaggctccgcgcacgagggctgcatgccgcccttccccgcggacgtcttcatgctgccgcagtacggctacctcacgctcaacgggcccggcaccaacaacaacaacctcagcacgccctcgagcgccttctactgcctagaatac

SEQ ID NO: 220 - DNA, 447 bp, Bat adeno-associated virus
ctgcccacctacaacaaccacctctacaaacagatcaactcaaataccagcgacgccaaagaaacctactttggctacagcactccttgggggtattttgacttcaaccggttccactgtcacttctcgccgagggactggcaacgcctcatcaacaaccactggggcatgcgacccaaaagactcaactttaaactgtttaacatccaagtcaaagaggtcacgacgaacgacggtacgaagacgatcgcgaacaaccttacctcgacggtgcaagtctttgcggactcggagtaccaactcccctacgtgctaggaaacgctcacgagggctgctttccaccgtttccagcggacgtcttcatgctgccacaatacggatatctgactctcaattcgaacgacaacaaagccatgccacagagttccttctactgcctagaatac

SEQ ID NO: 221 - DNA, 444 bp, Bat adeno-associated virus
ctgcccacctacaacaaccacctctacaaacaaatcaactccaccaaccagaccaacgacgagacctactttggatacaccacaccatggggatatttcgactttaaccgtttccactgccacttttcaccacgagattggcaacgactcatcaacaaccactggggcatgcgaccaaaaagactcaactttaaaatcttcaacatccaagtcaaagaggtcacgacgaatgatggaacgacgacaatcgccaataacctcacatccaccatccaggtgtttgcggacacggactatcagttaccgtacgtgctaggcaacgcacacgaaggctgtctaccaccatttccagccgatgtgtttatgctgccgcaatacggttatttgaccttgaatgaaggtcacaaggcaatgccgcagagctccttctactgcctagaatac

SEQ ID NO: 222 - DNA, 456 bp, Bat adeno-associated virus
ctgcccacctacaacaaccacctgtacaagcagatcaacggcaccggcaccggggacgcggtgtactttggttacagcacgccttggggatacttcgatttcaatcgattccactgccacttttctccccgagactggcagcgcctcgtcaacaaccactggggcatccgcccccgaaggctcagcttcaagctcttcaacatccaggtcaaggaggtcacgacgacggacggcaccaagaccatcgccaataacctcacgtccaccgtccaggtgtttgcggacacggagcaccagctcccgtacatcctaggctccgcgcacgagggctgcatgccgcccttccccgcggacgtcttcatgctgccgcagtacggctacctcacgctcaacgggcccggcaccaacaacaacaacctcagcacgccctcgagcgccttctactgcctagaatac

SEQ ID NO: 223 - DNA, 462 bp, Bat adeno-associated virus
ctgcccacctacaacaaccacctctaccgccagatcaacggcaccggcaccggagacggcacgtactttggttacagcacgccttggggatacttcgatttcaatcgattccactgccacttttctcccagggactggcagcggctcatcaacaaccactggggcatccgccccaagcgcctccactttaagctcttcaacatccaggtcaaggaagtcacgacgaccgacggcaccacgaccatcgccaacaacctcaccagcaccatacaggtctttgcggacacggagtaccagctcccgtacgtgctcggcaacgcccacgagggctgcctgccgccgttcccggcggacgtcttcatgctgccgcagtacgcgtacctgacgctcaacgccaaccccacgaaccaaagcgccgccgcgctcagtctgccgcagagcgccttctactgcctagaatac

SEQ ID NO: 224 - DNA, 456 bp, Bat adeno-associated virus
ctgcccacctacaacaaccacctgtacaagcagatcaacggcaccggaaccggggacgcgggttactttggttacagcacgccttggggatacttcgatttcaatcgattccactgccacttttctccccgagactggcagcgcctcgtcaacaaccactggggcatccgcccccgaaggctcaacttcaagctcttcaacatccaggtcaaggaggtcacgacgacggacggcaccaagaccatcgccaataacctcacgtccaccgtccaggtgtttgcggacacggagcaccagctcccgtacatcctaggctccgcgcacgagggctgcatgccgcccttccccgcggacgtgttcatgctgccgcagtacggctacctcacgctcaacgggcccggcaccaacaacaacaacctcagcacgccctctagcgccttctactgcctagaatac

SEQ ID NO: 225 - DNA, 462 bp, Bat adeno-associated virus
ctgcccacctacaacaaccacctctaccgccagatccagtccagcggcaccggagacggcacgtactttggttacagcacgccttggggatacttcgatttcaatcgattccactgccacttttctcccagggactggcagcggctcatcaacaaccactggggcatccgccccaagcgcctccactttaagctcttcaacatccaggtcaaggaggtcacgacgaccgacggcaccacgaccatcgccaacaacctcaccagcaccatacaggtctttgcggacacggagtaccagctcccgtacgtgctcggcaacgcccacgagggctgcctgccgccgttcccggcggacgtcttcatgctgccgcagtacgcgtacctgacgctcaacgccaaccccacgaaccaaagcgccgccgcgctcagtctgccgcagagcgccttctactgcctagaatac

SEQ ID NO: 226 - DNA, 462 bp, Bat adeno-associated virus
ctgcccacctacaacaaccacctctacaaacaaatacagtcatcccagcaaggcgacggcacctactacggctacagcaccccgtggggatactttgactttaaccgcttccactgccacttttcaccccgagactggcagcgcctcatcaacaaccattggggcatccgtccgaagaggctcaactttaagctgttcaacatccaggccaaggaggtcacaacgaatgatggaacgacaacgatcgccaataacctcacatcgaccgtccaggtctttgcggacgcggagtaccagctaccgtacgtgctaggcaacgcccacgagggctgcctacctccgtttcccgcggatgtttttatgctgccgcagtacgggtacctcacgctcaactcgaaccccaccggctcccagacagctgccttcagtctgccgcagagcgccttctactgcctagaatac

SEQ ID NO: 227 - DNA, 444 bp, Bat adeno-associated virus
ctgcccacctacaacaaccaccgctacaaacaaatcaactcttcatcggaaggagtcgacgaggcctactttggctacagcaccccgtggggatactttgactttaaccgcttccactgccacttttcaccccgagactggcagcgcctcatcaacaaccattggggcatccgtccgaagagcctcaactttaagctcttcaacatccaggtcaaggaggtcacgacgaacgacggaacgacaacgatcgccaataacctcacgtcaaccgtgcaagtgtttgcggacaccgagtaccagctgccctacatcctgggcaacgcgcacgagggctgcctcccaccgttcccagcggacgtgttcatgctgccgcagtacggatacctaacgctgaacaagtctcacaatgctctggcccaggggtccttctactgcctcgaatac

SEQ ID NO: 228 - DNA, 444 bp, Bat adeno-associated virus
ctgcccacctacaacaaccaccagtacaagcgcatcgactcaaagggagccaccagcaaggacaatttctacagctactctactccgtggggatactttgactttaaccgcttccagtactacttttcaccccgaaactggcagtgcttcgtcaaatacaattggggtctctggtccaagagactttccttcaagctgttcaacgtccaggttaaggaggtcactacgcaggagggagccacgaccatcaccaataacctcaccagcaccatccaggtctttgcggactcggactaccagttcctgcacgtgctaggcaacgcgcacgagggaacgctgcctcccttcccggcccatgtcttcacggtcccccagtacgcctacgacacgctcaacaacggggacaacgccgcagctagcagcaccttctactgcctagaatac

SEQ ID NO: 229 - DNA, 440 bp, Bat adeno-associated virus
aacaaccaccgctacaagcagatcaactcttcatccgaaggagtcgacgaagcgtactttggatacagtaccccgtggggatactttgactttaaccgcttccactgccacttttcaccccgagactggcagcgcctcgtcaacaaccattggggtatccgcccaaagagcctcaactttaagctcttcaacatccaagtcaaggaggtcacgacgaacgacggaacaacgaccatcgccaataacctcacgtcgaccgtgcaagtgtttgccgacaccgagtaccagctgccctacgtcctgggcagtgcgcacgagggctgcctgccgccgttcccggccgacgtgttcatgctgccgcagtacggatacctcacgctgaacaagtcacacgatgctctggcacaggggtccttctactgcctggagtacaatctcaa

SEQ ID NO: 230 - DNA, 500 bp, Bat adeno-associated virus
actttggctctgagccagctcacccaagacggatccgagtcagcggcaggagccgcgggaggaagcgcacaggccccaaatatggccacttctgaaatggctgcagctggtggcggagcagtgggcgacgttggccaaggtgccgatggagtgggtagcgcctcgggagattggcattgcgattccacatggatgggagacagagtcatcaccaagtccaccagaacctgggccctcccaacctacaacaaccacctgtacaaaaagatcaacaactccaccaacagtaacacagacaaccaatacttcggctactccactccttggggatatttcgactttaaccgattccactgtcacttctcgccgagggattggcagcgccttgtcaacaacaactggggattccgaccgcgaagtctcaactttaagctgttcaacatccaagtcaaggaggtcacgcagactgatggaacgactacgattgccaataacctcac

SEQ ID NO: 231 - DNA, 2199 bp, Duck parvovirus
atgtctacttttttagagaaatttgaagactggtatgagactgcagccgcatcttggcggcatttgaaagctggagcccccaagccaaaatcaaaccagcaatctcagtctgtgtctacagacagaaaaccccaacgaacagacaataataggggctttgtacttcctgggtataagtatcttgggcctggtaacggccttgataaaggcccacctgtcaataaagcggacagcgtcgcgcttgagcacgataaagcgtacgaccaacagctcaaggcaggagacaacccctatataaaatttaatcacgcagatcaagaatttataaataatctgcaaggtgatacctcctttggaggcaacctcggaaaagccgtattccaagctaaaaaaagaattctagagcctttaggcctagtagaagaacctgtaaacacggctcctgctaaaaagagtagtggaaaactaacagatcactaccctatagtaaaaaagcctaaattatctgaagaaaactctccttcacccagtaatagtggaggagaagcaagtgcagctgccaccgaaggctccgaacctgtggcagcacctaacatggcagagggaggaagcggagctatgggcgactctgcagggggtgccgatggagtgggtaatgcctcaggaaattggcattgcgattcccaatggctgggagacacagtcattaccaagactacaagaacctgggtcctgccaagctacaacaaccacatctacaaagccatcacaagcggaacaaacccagacacaaatacccaatatgctggatacagcaccccctgggggtactttgatttcaacagattccactgccatttctctccaagagactggcagagactcatcaacaaccattgggggattagaccgaaagcactcaaattcaagatattcaatatgcaagttaaagaagtcacgacgcaagaccagacaaagactattgctaacaaccttacctctacaatccagatattcacggataatgaacaccagctgccctatgttctgggctcggccacggaggggacgatgccaccgttcccctcagatgtgtatgccttgccccagtacggctactgcacaatgcacaccaaccagagtggagctagattcaatgacagaagtgccttctattgcttagagtacttccccagtcaaatgctgagaacggggaataattttgaattcagttttgagtttgaagaagttcccttccatagcatgttcgctcattcacaggatttagataggctaatgaatcctctcctagatcagtacctgtggaatttctctgaggttaatggtggcaggaatgcacagttcaaaaaagctgtgaaaggagcatttggtgcaatggggagaaattggcttccaggacccaagcttctagaccaaagggtaagagtatacagtggaggaacagataactatgcaaactggtcaatctggactaaaggaaacaaagttttccttaaagacagagagtatctattgcaaccaggtccagtagctactacacatacagaagatcaggcttccagtataccggctcaaaacacaataggaattgcaaaagacccctacaggtcaggcagtactctggcaggaatttcagacattatggtaccagatgagcaagaaatagcaccaactaacggtgtagggtggagaccttatggattgaccgtaaccaatgaacaaaacacaacaacagctcctacaaatgctgagctagaagtactgggagcgctacctggcatggtctggcagaacagagatatttacctgcagggtcctatatgggctaaaatacccaaaacagatgggaaatttcatccttctccaacctggggaggttttggtctccataatccacctccccaggtctttattaagaatactcctgttcctgcagatcctccagtagagtatgtaaatcagaagtggaattcttacattacacagtattcaacagggcagtgtactgtagaaatggtctgggaactcagaaaagaaaactccaagagatggaaccctgagatccagtttaccagtaactttggaaatagaacaagtactatgtttgctccgaatgagactggaggctatgtagaagataggctgattggtaccaggtatttgactcagaatctgtaa

SEQ ID NO: 232 - DNA, 2199 bp, Duck parvovirus
atgtctacttttttagagaaatttgaagactggtatgagactgcagccgcatcttggcggcatttgaaagctggagcccccaagccaaaatcaaaccagcaatctcagtctgtgtctacagacagaaaaccccaacgaacagacaataataggggctttgtacttcctgggtataagtatcttgggcctggtaacggccttgataaaggcccacctgtcaataaagcggacagcgtcgcgcttgagcacgataaagcgtacgaccaacagctcaaggcaggagacaacccctatataaaatttaatcacgcagatcaagaatttataaataatctgcaaggtgatacctcctttggaggcaacctcggaaaagccgtattccaagctaaaaaaagaattctagagcctttaggcctagtagaagaacctgtaaacacggctcctgctaaaaagagtagtggaaaactaacagatcactaccctatagtaaaaaagcctaaattatctgaagaaaactctccttcacccagtaatagtggaggagaagcaagtgcagctgccaccgaaggctccgaacctgtggcagcacctaacatggcagagggaggaagcggagctatgggcgactctgcagggggtgccgatggagtgggtaatgcctcaggaaattggcattgcgattcccaatggctgggagacacagtcattaccaagactacaagaacctgggtcctgccaagctacaacaaccacatctacaaagccatcacaagcggaacaaacccagacacaaatacccaatatgctggatacagcaccccctgggggtactttgatttcaacagattccactgccatttctctccaagagactggcagagactcatcaacaaccattgggggattagaccgaaagcactcaaattcaagatattcaatgtgcaagttaaagaagtcacgacgcaagaccagacaaagactattgctaacaaccttacctctacaatccagatattcacggataatgaacaccagctgccctatgttctgggctcggccacggaggggacgatgccaccgttcccctcagatgtgtatgccttgccccagtacggctactgcacaatgcacaccaaccagagtggagctagattcaatgacagaagtgccttctattgcttagagtacttccccagtcaaatgctgagaacggggaataattttgaattcagttttgagtttgaagaagttcccttccatagcatgttcgctcattcacaggatttagataggctaatgaatcctctcctagatcagtacctgtggaatttctctgaggttaatggtggcaggaatgcacagttcaaaaaagctgtgaaaggagcatttggtgcaatggggagaaattggcttccaggacccaagcttctagaccaaagggtaagagtatacagtggaggaacagataactatgcaaactggtcaatctggactaaaggaaacaaagttttccttaaagacagagagtatctattgcaaccaggtccagtagctactacacatacagaagatcaggcttccagtataccggctcaaaacacaataggaattgcaaaagacccctacaggtcaggcagtactctggcaggaatttcagacattatggtaacagatgagcaagaaatagcaccaactaacggtgtagggtggagaccttatggattgaccgtaaccaatgaacaaaacacaacaacagctcctacaaatgctgagctacaagtactgggagcgctacctggcatggtctggcagaacagagatatttacctgcagggtcctatatgggctaaaatacccaaaacagatgggaaatttcatccttctccaaacctgggaggttttggtctccataatccacctccccaggtctttattaagaatactcctgttcctgcagatcctccagtagagtatgtaaatcagaagtggaattcttacattacacagtattcaacagggcagtgtactgtagaaatggtctgggaactcagaaaagaaaactccaagagatggaaccctgagatccagtttaccagtaactttggaaatagaacaagtactatgtttgctccgaatgagactggaggctatgtagaagataggctgattggtaccaggtatttgactcagaatctgtaa

SEQ ID NO: 233 - DNA, 2199 bp, Duck parvovirus
atgtctacttttttagagaaatttgaagactggtatgagactgcagccgcatcttggcggcatttgaaagctggagcccccaagccaaaatcaaaccagcaatctcagtctgtgtctacagacagaaaaccccaacgaacagacaataataggggctttgtacttcctgggtataagtatcttgggcctggtaacggccttgataaaggcccacctgtcaataaagcggacagcgtcgcgcttgagcacgataaagcgtacgaccaacagctcaaggcaggagacaacccctatataaaatttaatcacgcagatcaagaatttataaataatctgcaaggtgatacctcctttggaggcaacctcggaaaagccgtattccaagctaaaaaaagaattctagagcctttaggcctagtagaagaacctgtaaacacggctcctgctaaaaagagtagtggaaaactaacagatcactaccctatagtaaaaaagcctaaattatctgaagaaaactctccttcacccagtaatagtggaggagaagcaagtgcagctgccaccgaaggctccgaacctgtggcagcacctaacatggcagagggaggaagcggagctatgggcgactctgcagggggtgccgatggagtgggtaatgcctcaggaaattggcattgcgattcccaatggctgggagacacagtcattaccaagactacaagaacctgggtcctgccaagctacaacaaccacatctacaaagccatcacaagcggaacaaacccagacacaaatacccaatatgctggatacagcaccccctgggggtactttgatttcaacagattccactgccatttctctccaagagactggcagagactcatcaacaaccattgggggattagaccgaaagcactcaaattcaagatattcaatatgcaagttaaagaagtcacgacgcaagaccagacaaagactattgctaacaaccttacctctacaatccagatattcacggataatgaacaccagctgccctatgttctgggctcggccacggaggggacgatgccaccgttcccctcagatgtgtatgccttgccccagtacggctactgcacaatgcacaccaaccagagtggagctagattcaatgacagaagtgccttctattgcttagagtacttccccagtcaaatgctgagaacggggaataattttgaattcagttttgagtttgaagaagttcccttccatagcatgttcgctcattcacaggatttagataggctaatgaatcctctcctagatcagtacctgtggaatttctctgaggttaatggtggcaggaatgcacagttcaaaaaagctgtgaaaggagcatttggtgcaatggggagaaattggcttccaggacccaagcttctagaccaaagggtaagagtatacagtggaggaacagataactatgcaaactggtcaatcgggactaaaggaaacaaagttttccttaaagacagagagtatctattgcaacccggtccagtagctactacacatacagaagatcaggcttccagtataccggctcaaaacacaataggaattgcaaaagacccctacaggtcaggcagtactctggcaggaatttcagacattatggtaccagatgagcaagaaatagcaccaactaacggtgtagggtggagaccttatggattgaccgtaaccaatgaacaaaacacaacaacagctcctacaaatgctgagctacaagtactgggagcgctacctggcatggtctggcagaacagagatatttacctgcagggtcctatatgggctaaaatacccaaaacagatgggaaatttcatccttctccaaacctgggaggttttggtctccataatccacctccccaggtctttattaagaatactcctgttcctgcagatcctccagtagagtatgtaaatcagaagtggaattcttacattacacagtattcaacagggcagtgtactgtagaaatggtctgggaactcagaaaagaaaactccaagagatggaaccctgagatccagtttaccagtaactttggaaatagaacaagtactatgtttgctccgaatgagactggaggctatgtagaagataggctgattggtaccaggtatttgactcagaatctgtaa

SEQ ID NO: 234 - DNA, 1680 bp, Fox adeno-associated virus
gacgacgaagacctcgttgccaggcaacaggcagctcaatctggagcagaaggaaccggatcttcagctccagcagccaatcccgatttgggtcctactacaatgtctggaggcggaggcgcgccgatggcagacgatcaacagggtgccgatggagtgggtacttcctcaggaaattggcattgcgattccacctggctggacaaccgagtcattaccaaatccaccagaacctggagcctgcccacctacaacaaccacctctacaacaagatcgcctccaccaccacctccggaaacggaacctggttcggattcagtaccccctggggatactttgacttcaaccgcttccactgccacttctcgcctcgagactggcaacgactcatcaacaacaactggggtatccggcccaagaagatgcacgtcaagctcttcaatattcaagttaaagaagtcacgacgcaagactcgactacgaccatcaccaataaccttaccagcacgattcaagtgtttgcggacacggagtatcagctgccgtacgtagccggtaacgcccacgaaggatgccttccaccctttccggccgacgtcttcatgcttccgcagtacggctactgcactctgcaaaacgagaacaccaacgaacccgtgccacagagcgccttctactgcctggaatacttccccagccagatgctgaggaccggaaacaactacgccatcagctacagcttcgaagatgtgcccttccacagcatgtacatgcacaaccagagcctggaccggctgatgaacccgcttatcgaccagtacttgtggtacctgaccagcacgacgaacaatgccaacacgttcggcaagtcgaccaaagaagacctgcctcgtcagaaccggaactggctgcctgggcccgccttccaaacggcggcctataacctgaatggacagggaaactttgccagctccactcactggaactacctgaacaagtatagcctaaacggaagacaagcggccatcggtcctggtcccgtcgtagctcccaacgacgcaaccttccagtccaacggcatgatctttgccaagaacgccgatacacccgctacgtccgctcctcaagacaccgtcaacatcaccagcgagtcggagacttcaaccgtcaaccccaggatgggcatcaatcctctgatcattaataatagtaacaccccggctactaccgcgccctccatgtcgaatcgacctaccaatcccgtcatgcccggatccgtctggcaaaacagagacatttacctccagggcccgatctgggccaagatcccgcgtactgatggaaccttccacccttcgcctctgatgggaggcttcgggctgcgtcatcctcctcctcaaatcttcatcaagaacacgcccgttccggcgaatcctccgaccaccttcacacctgcgaaggtcaattccttcatcacccaatactcgaccggacaaatcaccgtggagatggaatgggagctggagaaggagaacagcaagagatggaacccggagatccagttcaccaacaattttaacacggcggacacgggcgtagtccccttctgcgtgaacaacgtcggagcctacttcgagtcccgtcccattggaacccgatacctcacccgtactctgtaa

SEQ ID NO: 235 - DNA, 2199 bp, Goose parvovirus
atgtctacttttttagattcttttgaagagtggtatgaaactgcagccgcctcgtggcggaatctgaaagctggagcccctcacccaaaaccaaaccagcagactcagtctgtgtctccagccagagaacccgaacgaagagataataaccggggctttgtacttcctggctataagtatcttggccctggtaacggccttgataaagggccacccgttaataaggcggacagcgtcgcgcttgaacacgacaaggcctacgaccaacagcttaaagcgggagacaacccatatataaaattcaatcacgctgaccaggactttatagatagcctccaagacgaccagtcgttcggaggtaatcttggaaaggctgtatttcaggccaaaaaacgtatcttagaaccatttggcctagtagaagatcctgtcaacacggcacctgcaaaaaaaaatacagggaagcttaccgaccactacccggtagttaagaagcctaaacttaccgaggaagtcagtgcgggaggtggtagtagtgccgtacaagacggaggagccaccgcggagggcaccgaacctgtggcagcatctgaaatggcagagggaggaggcggagctttgggcgacgcttcagggggtgccgatggagtgggtaatgcctcgggaaattggcattgcgattcccaatggatgggaaacacagtcatcacaaagaccaccagaacctgggtcctgccaagctacaacaaccacatctacaaagcgattaccagtggaacctctcaagatgcaaatgtccagtatgcaggatacagtaccccctgggggtactttgatttcaaccgcttccactgccacttctcccctagagactggcagagacttatcaacaaccattggggaatcagacccaagtctcttaaattcaagatcttcaatgtccaagtcaaagaagtcacaacgcaggatcagacgaagaccattgcaaacaatctcacgtcaacaattcaagtctttacggatgacgagcatcaactcccgtatgtcctgggctcggctacagaaggcaccatgccgccgttcccgtcggatgtgtatgccctgccgcagtacgggtattgcacaatgcacaccaaccagaacggtgcacgattcaatgaccggagtgcattctactgcttagaatacttccccagtcagatgctaagaacaggcaacaactttgagtttacgtttgactttgaagaagttcctttccacagcatgttcgctcattcacaggacttagacaggctgatgaaccccttagtggatcaatacctctggaatttcaatgaggtagacagcagcagaaatgctcaatttaaaaaggctgtgaaaggcgcttatggcaccatgggccgcaattggctgccaggacctaaattcctggaccagagagttagggcctatacaggcggaacagataattacgcaaactggaacatctggagtaatggaaacaaggttaatttgaaggacaggcagtacctcctgcaacccggacctgtatcagctactcacacagaagcagaggcttccagcatcccagcccaaaatattttaggtttagctaaagatccatacagatctggcagcactacagcaggaataagtgatattatggtcacggacgagcaggaagtagcacctacaaacggcgtagggtggaaaccatatggcaagactgtaacgaatgaacaaaacactactacagctcctacaagttcagatctggatgttcttggagctttaccaggaatggtttggcagaacagggatatatatctgcagggacctatttgggcaaaaataccgaagactgatggtaaattccatccttctccgaatctcggaggatttggtctgcacaatccaccaccgcaggtgttcatcaagaatacaccagttcctgcagaccctccagtagaatacgtgcaccagaagtggaattcctacataacccagtactctacgggccagtgtacagtagagatggtgtgggagctgagaaaagagaattcaaagagatggaacccagaaatccagttcaccagtaatttcagtgacagaacaagcataatgtttgcacctaatgaaactggtggatatgtagaagatagattaattggaaccagatatctaactcaaaatctgtaa

SEQ ID NO: 236 - DNA, 2199 bp, Goose parvovirus
atgtctacttttttagattcttttgaagagtggtatgaaactgcagccgcctcgtggcggaatctgaaagctggagcccctcacccaaaaccaaaccagcagactcagtctgtgtctccagccagagaacccgaacgaagagataataaccggggctttgtacttcctggctataagtatcttggccctggtaacggccttgataaagggccacccgttaataaggcggacagcgtcgcgcttgaacacgacaaggcctacgaccaacagcttaaagcgggagacaacccatatataaaattcaatcacgctgaccaggactttatagatagcctccaagacgaccagtcgttcggaggtaatcttggaaaggctgtatttcaggccaaaaaacgtatcttagaaccatttggcctagtagaagatcctgtcaacacggcacctgcaaaaaaaaatacagggaagcttaccgaccactacccggtagttaagaagcctaaacttaccgaggaagtcagtgcgggaggtggtagtagtgccgtacaagacggaggagccaccgcggagggcaccgaacctgtggcagcatctgaaatggcagagggaggaggcggagctttgggcgacgcttcagggggtgccgatggagtgggtaatgcctcgggaaattggcattgcgattcccaatggatgggaaacacagtcatcacaaagaccaccagaacctgggtcctgccaagctacaacaaccacatctacaaagcgattaccagtggaacctctcaagatgcaaatgtccagtatgcaggatacagtaccccctgggggtactttgatttcaaccgcttccactgccacttctcccctagagactggcagagacttatcaacaaccattggggaatcagacccaagtctcttaaattcaagatcttcaatgtccaagtcaaagaagtcacaacgcaggatcagacaaagaccattgcaaacaatctcacgtcaacaattcaagtctttacggatgacgagcatcaactcccgtatgtcctgggctcggctacagaaggcaccatgccgccgttcccgtcggatgtgtatgccctgccgcagtacgggtattgcacaatgcacaccaaccagaacggtgcacgattcaatgaccggagtgcattctactgcttagaatacttccccagtcagatgctaagaacaggcaacaactttgagtttacgtttgactttgaagaagttcctttccacagcatgttcgctcattcacaggacttagacaggctgatgaaccccttagtggatcaatacctctggaatttcaatgaggtagacagcagcagaaatgctcaatttaaaaaggctgtgaaaggcgcttatggcaccatgggccgcaattggctgccaggacctaaattcctggaccagagagttagggcctatccaggcggaacagataattacgcaaactggaacatctggagtaatggaaacaaggttaatttgaaggacaggcagtacctcctgcaacccggacctgtatcagctactcacacaaaagcagaggcttccagcatcccagcccaaaatattttaggtttagctaaagatccatacagatctggcagcactacagcaggaataagtgatattatggtcacggacgagcaggaagtagcacctacaaacggcgtagggtggaaaccatatggcaagactgtaacgaatgaacaaaacactactacagctcctacaagttcagatctggatgttcttggagctttaccaggaatggtttggcagaacagggatatatatctgcagggacctatttgggcaaaaataccgaagactgatggtaaattccatccttctccgaatctcggaggatttggtctgcacaatccaccaccgcaggtgttcatcaagaatacaccagtgcctgcagaccctccagtagaatacgtgcaccagaagtggaattcctacataacccagtactctacgggccagtgtacagtagagatggtgtgggagctgagaaaagagaattcaaagagatggaacccagaaatccagttcaccagtaatttcagtgacagaacaagcataatgtttgcacctaatgaaactggtggatatgtagaagatagattaattggaaccagatatctaactcaaaatctgtaa

SEQ ID NO: 237 - DNA, 2199 bp, Goose parvovirus
atgtctacttttttagattcttttgaagagtggtatgaaactgcagccgcctcgtggcggaatctgaaagctggagcccctcacccaaaaccaaaccagcagactcagtctgtgtctccagccagagaacccgaacgaagagataataaccggggctttgtccttcctggctataagtatcttggccctggtaacggccttgataaagggccacccgttaataaggcggacagcgtcgcgcttgaacacgacaaggcctacgaccaacagcttaaagcgggagacaacccatatataaaattcaatcacgctgaccaggactttatagatagcctccaagacgaccagtcgttcggaggtaatcttggaaaggctgtatttcaggccaaaaaacgtatcttagaaccatttggcctagtagaagatcctgtcaacacggcacctgcaaaaaaaaatacagggaagcttaccgaccactacccggtagttaagaagcctaaacttaccgaggaagtcagtgcgggaggtggtagtagtgccgtacaagacggaggagccaccgcggagggcaccgaacctgtggcagcatctgaaatggcagagggagaaggcggagctttgggcgacgcttcagggggtgccgatggagtgggtaatgcctcgggaaattggcattgcgattcccaatggatgggaaacacagtcatcacaaagaccaccagaacctgggtcctgccaagctacaacaaccacatctacaaagcgattaccagtggaacctctcaagatgcaaatggccagtatgcaggatacagtaccccctgggggtactttgatttcaaccgcttccactgccacttctcccctagagactggcagagacttatcaacaaccattggggaatcagacccaagtctcttaaattcaagatcttcaatgttcaagtcaaggaagtcacaacgcaggatcagacaaagaccattgcaaacaatctcacctcaacaattcaagtttttacggatgatgagcatcaactcccgtatgtcctgggctcggctacggaagggaccatgccgccgttcccgtcggatgtctatgccctgccgcagtacgggtactgcacaatgcacaccaaccagaatggagcacggttcaatgaccgtagtgcattctactgcttagagtacttccctagtcagatgctgagaacaggtaacaactttgagttcacatttgactttgaagaagttcctttccacagcatgttcgctcattcacaggacttagacaggcttatgaaccccctagtggatcaatacctctggaatttcaatgaggtagacagcagcagaaatgctcaatttaaaaaagctgtgaaaggggcttatggcaccatgggccgcaattggctgccaggacctaaattcctggatcagagagttagggcctacccaggaggaacagacaattatgcaaactggaacatctggagtaatgggaacaaggtgaatttaaaggacaggcagtatctcctacaacccggacctgtgtcagctactcacacagaaagggaggcttccagcatcccagctcagaatattttagggatagctaaagatccatacagatctggcagcactacagcaggaataagtgatattatggtcacggacgagcaggaagtagcacccacaaatgtagtagggtggaaaccatatggtaggactgtaacgaatgaacaaaacactactacagctcctacaagttcagatctggatgttcttggagctttaccaggaatggtgtggcagaacagagatatatatctgcagggacctatttgggcaaaaataccgaagactgatggcaaattccatccttctccaaatctcggaggatttggcctgcacaatccaccaccacaggtcttcatcaagaatacaccagtacctgcagaccctccagtagaatatgtgcaccagaagtggaactcctacataactcagtactctacgggccagtgtacagtagaaatggtgtgggagctgagaaaagagaattcaaagagatggaacccagaaatccagttcaccagcaatttcagtaacagaactaatatcatgtttgcacctaatgaaactggtggatatgtagaagatagattgattggaaccagatatctaactcaaaatctgtaa

SEQ ID NO: 238 - DNA, 2199 bp, Goose parvovirus
atgtctacttttttagattcttttgaagagtggtatgaaactgcagccgcctcgtggcggaatctgaaagctggagcccctcacccaaaaccaaaccagcagactcagtctgtgtctccagccagagaacccgaacgaagagataataaccggggctttgtccttcctggctataagtatcttggccctggtaacggccttgataaagggccacccgttaataaggcggacagcgtcgcgcttgaacacgacaaggcctacgaccaacagcttaaagcgggagacaacccatatataaaattcaatcacgctgaccaggactttatagatagcctccaagacgaccagtcgttcggaggtaatcttggaaaggctgtatttcaggccaaaaaacgtatcttagaaccatttggcctagtagaagatcctgtcaacacggcacctgcaaaaaaaaatacagggaagcttaccgaccactacccggtagttaagaagcctaaacttaccgaggaagtcagtgcgggaggtggtagtagtgccgtacaagacggaggagccaccgcggagggcaccgaacctgtggcagcatctgaaatggcagagggagaaggcggagctttgggcgacgcttcagggggtgccgatggagtgggtaatgcctcgggaaattggcattgcgattcccaatggatgggaaacacagtcatcacaaagaccaccagaacctgggtcctgccaagctacaacaaccacatctacaaagcgattaccagtggaacctctcaagatgcaaatggccagtatgcaggatacagtaccccctgggggtactttgatttcaaccgcttccactgccacttctcccctagagactggcagagacttatcaacaaccattggggaatcagacccaagtctcttaaattcaagatcttcaatgttcaagtcaaggaagtcacaacgcaggatcagacaaagaccattgcaaacaatctcacctcaacaattcaagtttttacggatgatgagcatcaactcccgtatgtcctgggctcggctacggaagggaccatgccgccgttcccgtcggatgtctatgccctgccgcagtacgggtactgcacaatgcacaccaaccagaatggagcacggttcaatgaccgtagtgcattctactgcttagagtacttccctagtcagatgctgagaacaggtaacaactttgagttcacatttgactttgaagaagttcctttccacagcatgttcgctcattcacaggacttagacaggcttatgaaccccctagtggatcaatacctctggaatttcaatgaggtagacagcagcagaaatgctcaatttaaaaaagctgtgaaaggggcttatggcaccatgggccgcaattggctgccaggacctaaattcctggatcagagagttagggcctacccaggaggaacagacaattatgcaaactggaacatctggagtaatgggaacaaggtgaatttaaaggacaggcagtatctcctacaacccggacctgtgtcagctactcacacagaaagggaggcttccagcatcccagctcagaatattttagggatagctaaagatccatacagatctggcagcactacagcaggaataagtgatattatggtcacggacgagcaggaagtagcacccacaaatgtagtagggtggaaaccatatggtaggactgtaacgaatgaacaaaacactactacagctcctacaagttcagatctggatgttcttggagctttaccaggaatggtgtggcagaacagagatatatatctgcagggacctatttgggcaaaaataccgaagactgatggcaaattccatccttctccaaatctcggaggatttggcctgcacaatccaccaccacaggtcttcatcaagaatacaccagtacctgcagaccctccagtagaatatgtgcaccagaagtggaactcctacataactcagtactctacgggccagtgtacagtagaaatggtgtgggagctgagaaaagagaattcaaagagatggaacccagaaatccagttcaccagcaatttcagtaacagaactagtataatgtttgcacctaatgaaactggtggatatgtagaagatagattaattggaaccagatatctaactcaaaatctgtaa

SEQ ID NO: 239 - DNA, 2199 bp, Goose parvovirus
atgtctacttttttagattcttttgaagagtggtatgaaactgcagccgcctcgtggcggaatctgaaagctggagcccctcacccaaaaccaaaccagcagactcagtctgtgtctccagccagagaacccgaacgaagagataataaccggggctttgtacttcctggctataagtatcttggccctggtaacggccttgataaagggccacccgttaataaggcggacagcgtcgcgcttgaacacgacaaggcctacgaccaacagcttaaagcgggagacaacccatatataaaattcaatcacgctgaccaggactttatagatagcctccaagacgaccagtcgttcggaggtaatcttggaaaggctgtatttcaggccaaaaaacgtatcttagaaccatttggcctagtagaagatcctgtcaacacggcacctgcaaaaaaaaatacagggaagcttaccgaccactacccggtagttaagaagcctaaacttaccgaggaagtcagtgcgggaggtggtagtagtgccgtacaagacggaggagccaccgcggagggcaccgaacctgtggcagcatctgaaatggcagagggaggaggcggagctttgggcgacgcttcagggggtgccgatggagtgggtaatgcctcgggaaattggcattgcgattcccaatggatgggaaacacagtcatcacaaagaccaccagaacctgggtcctgccaagctacaacaaccacatctacaaagcgattaccagtggaacctctcaagatgcaaatgtccagtatgcaggatacagtaccccctgggggtactttgatttcaaccgcttccactgccacttctcccctagagactggcagagacttatcaacaaccattggggaatcagacccaagtctcttaaattcaagatcttcaatgtccaagtcaaagaagtcacaacgcaggaacagacgaagaccattgcaaacaatctcacgtcaacaattcaagtctttacggatgacgagcatcaactcccgtatgtcctgggctcggctacagaaggcaccatgccgccgttcccgtcggatgtgtatgccctgccgcagtacgggtattgcacaatgcacaccaaccagaacggtgcacgattcaatgaccggagtgcattctactgcttagaatacttccccagtcagatgctaagaacaggcaacaactttgagtttacgtttgactttgaagaagttcctttccacagcatgttcgctcattcacaggacttagacaggctgatgaaccccttagtggatcaatacctctggaatttcaatgaggtagacagcagcagaaatgctcaatttaaaaaggctgtgaaaggcgcttatggcaccatgggccgcaattggctgccaggacctaaattcctggaccagagagttagggcctatagaggcggaacagataattacgcaaactggaacatctggagtaatggaaacaaggttaatttgaaggacaggcagtacctcctgcaacccggacctgtatcagctactcacacagaagcagaggcttccagcatcccagcccaaaatattttaggtttagctaaagatccatacagatctggcagcactacagcaggaataagtgatattatggtcacggacgagcaggaagtagcacctacaaacggcgtagggtggaaaccatatggcaagactgtaacgaatgaacaaaacactactacagctcctacaagttcagatctggatgttcttggagctttaccaggaatggtttggcagaacagggatatatatctgcagggacctatttgggcaaaaataccgaagactgatggtaaattccatccttctccgaatctcggaggatttggtctgcacaatccaccaccgcaggtgttcatcaagaatacaccagtgcctgcagaccctccagtagaatacgtgcaccagaagtggaattcctacataacccagtactctacgggccagtgtacagtagagatggtgtgggagctgagaaaagagaattcaaagagatggaacccagaaatccagttcaccagtaatttcagtgacagaacaagcataatgtttgcacctaatgaaactggtggatatgtagaagatagattaattggaaccagatatctaactcaaaatctgtaa

SEQ ID NO: 240 - DNA, 2199 bp, Goose parvovirus
atgtctacttttttagattcttttgaagagtggtatgaaactgcagccgcctcgtggcggaatctgaaagctggagcccctcacccaaaaccaaaccagcagactcagtctgtgtctccagccagagaacccggacgaagagataataaccggggctttgtacttcctggctataagtatcttggccctggtaacggccttgataaagggccacccgttaataaggcggacagcgtcgcgcttgaacacgacaaggcctacgaccaacagcttaaagcgggagacaacccatatataaaattcaatcacgctgaccaggactttatagatagcctccaagacgaccagtcgttcggaggtaatcttggaaaggctgtatttcaggccaaaaaacgtatcttagaaccatttggcctagtagaagatcctgtcaacacggcacctgcaaaaaaaaatacagggaagcttaccgaccactacccggtagttaagaagcctaaacttaccgaggaagtcagtgcgggaggtggtagtagtgccgtacaagacggaggagccaccgcggagggcaccgaacctgtggcagcatctgaaatggcagagggagaaggcggagctttgggcgacgcttcagggggtgccgatggagtgggtaatgcctcgggaaattggcattgcgattcccaatggatgggaaacacagtcatcacaaagaccaccagaacctgggtcctgccaagctacaacaaccacatctacaaagcgattaccagtggaacctctcaagatgcaaatggccagtatgcaggatacagtaccccctgggggtactttgatttcaaccgcttccactgccacttctcccctagagactggcagagacttatcaacaaccattggggaatcagacccaagtctcttaaattcaagatcttcaatgttcaagtcaaggaagtcacaacgcaggatcagacaaagaccattgcaaacaatctcacctcaacaattcaagtttttacggatgatgagcatcaactcccgtatgtcctgggctcggctacggaagggaccatgccgccgttcccgtcggatgtctatgccctgccgcagtacgggtactgcacaatgcacaccaaccagaatggagcacggttcaatgaccgtagtgcattctactgcttagagtacttccctagtcagatgctgagaacaggtaacaactttgagttcacatttgactttgaagaagttcctttccacagcatgttcgctcattcacaggacttagacaggcttatgaaccccctagtggatcaatacctctggaatttcaatgaggtagacagcagcagaaatgctcaatttaaaaaagctgtgaaaggggcttatggcaccatgggccgcaattggctgccaggacctaaattcctggatcagagagttagggcctacccaggaggaacagacaattatgcaaactggaacatctggagtaatgggaacaaggtgaatttaaaggacaggcagtatctcctacaacccggacctgtgtcagctactcacacagaaagggaggcttccagcatcccagctcagaatattttagggatagctaaagatccatacagatctggcagcactacagcaggaataagtgatattatggtcacggacgagcaggaagtagcacccacaaatgtagtagggtggaaaccatatggtaggactgtaacgaatgaacaaaacactactacagctcctacaagttcagatctggatgttcttggagctttaccaggaatggtgtggcagaacagagatatatatctgcagggacctatttgggcaaaaataccgaagactgatggcaaattccatccttctccaaatctcggaggatttggcctgcacaatccaccaccacaggtcttcatcaagaatacaccagtacctgcagaccctccagtagaatatgagcaccagaagtggaactcctacataactcagtactctatgggccagtgtacagtagaaatggtgtgggagctgagaaaagagaattcaaagagatggaacccagaaatccagttcaccagcaatttcagtaacagaactaatatcatgtttgcacctaatgaaactggtggatatgtagaagatagattgattggaaccagatatctaactcaaaatctgtaa

SEQ ID NO: 241 - DNA, 2199 bp, Goose parvovirus
atgtctacttttttagattcttttgaagagtggtacgaaactgcagccgcctcgtggcggaatctgaaagctggagcccctcacccaaaaccaaaccagcagactcagtctgtgtctccagccagagaacccgaacgaagagataataaccggggctttgtacttcctggctataagtatcttggccctggtaacggccttgataaagggccacccgttaataaggcggacagcgtcgcgcttgaacacgacaaggcctacgaccaacagcttaaagcgggagacaacccatatataagattcaatcacgctgaccaggactttatagatagcctccaagacgaccagtcgttcggaggtaatcttggaaaggctgtatttcaggccaaaaaacgtatcttagaaccatttggcctagtagaagatcctgtcaacacggcacctgcaaaaaaaaatacaggaaagcttaccgaccactacccggtagttaagaagcctaaacttaccgaggaagtcagtgcgggaggtggtagtagtgccgtacaagacggaggagccaccgcggagggcaccgaacctgtggcagcatctgaaatggcagagggaggaggcggagctttgggcgacgcttcagggggtgccgatggagtgggtaatgcctcgggaaattggcattgcgattcccaatggatgggaaacacagtcatcacaaagaccaccagaacctgggtcctgccaagctacaacaaccacatctacaaagcgattaccagtggaacctctcaagatgcaaatgtccagtatgcaggatacagtaccccctgggggtactttgatttcaaccgcttccactgccacttctcccctagagactggcagagacttatcaacaaccattggggaatcagacccaagtcacttaaattcaagatcttcaatgtccaagtcaaagaagtcacaacgcaggatcagacaaagaccattgcaaacaatcttacgtcaacaattcaagtctttacggatgacgagcatcaactcccgtatgtcctgggctcggctacagaaggcaccatgccgccgttcccgtcggatgtgtatgccctgccgcagtacgggtattgcacaatgcacaccaaccagaacggtgcacgattcaatgaccggagtgcattctactgcttagaatacttccccagtcagatgctaagaacaggcaacaactttgagtttacgtttgactttgaagaagttcctttccacagcatgttcgctcattcacaggacttagacaggctgatgaaccccttagtggatcaatacctctggaatttcaatgaggtagacagcagcagaaatgctcaatttaaaaaggctgtgaaaggcgcttatggcaccatgggccgcaattggctgccaggacctaaattcctggaccagagagttagggcctatacaggcggaacagataattacgcaaactggaacatctggagtaatggaaacaaggttaatttgaaggacaggcagtacctcctgcaacccggacctgtatcagctactcacacagaagcagaggcttccagcatcccagcccaaaatattttaggtttagctaaagatccatacagatctggcagcactacagcaggaataagtgatattatggtcacggacgagcaggaagtagcacctacgaacggcgtagggtggaaaccatatggcaaaactgtaacgaatgaacaaaacactactacagctcctacaagttcagatctggatgttcttggagctttaccaggaatggtttggcagaacagggatatatatctgcagggacctatttgggcaaaaataccgaagactgatggtaaattccatccttctccgaatctcggaggatttggtctgcacaatccaccaccgcaggtgttcatcaagaatacaccagtgcctgcagaccctccagtagaatacgtgcaccagaagtggaattcctacataacccagtactctacgggccagtgtacagtagagatggtgtgggagctgagaaaagagaattcaaagagatggaacccagaaatccagttcaccagtaatttcaatgacagaacaagcataatgtttgcacctaatgaaactggtggatatgtagaagatagattaattggaaccagatatctaactcaaaatctgtaa

SEQ ID NO: 242 - DNA, 2199 bp, Duck parvovirus
atgtctacttttttagagaaatttgaagactggtatgagactgcagccgcatcttggcggcatttgaaagctggagcccccaagccaaaatcaaaccagcaatctcagtctgtgtctacagacagaaaaccccaacgaacagacaataataggggctttgtacttcctgggtataagtatcttgggcctggtaacggccttgataaaggcccacctgtcaataaagcggacagcgtcgcgcttgagcacgataaagcgtacgaccaacagctcaaggcaggagacaacccctatataaaatttaatcacgcagatcaagaatttataaataatctgcaaggtgatacctcctttggaggcaacctcggaaaagccgtattccaagctaaaaaaagaattctagagcctttaggcctagtagaagaacctgtaaacacggctcctgctaaaaagagtagtggaaaactaacagatcactaccctatagtaaaaaagcctaaattatctgaagaaaactctccttcacccagtaatagtggaggagaagcaagtgcagctgccaccgaaggctccgaacctgtggcagcacctaacatggcagagggaggaagcggagctatgggcgactctgcagggggtgccgatggagtgggtaatgcctcaggaaattggcattgcgattcccaatggctgggagacacagtcattaccaagactacaagaacctgggtcctgccaagctacaacaaccacatctacaaagccatcacaagcggaacaaacccagacacaaatacccaatatgctggatacagcaccccctgggggtactttgatttcaacagattccactgccatttctctccaagagactggcagagactcatcaacaaccattgggggattagaccgaaagcactcaaattcaagatattcaatgtgcaagttaaagaagtcacgacgcaagaccagacaaagactattgctaacaaccttacctctacaatccagatattcacggataatgaacaccagctgccctatgttctgggctcggccacggaggggacgatgccaccgttcccctcagatgtgtatgccttgccccagtacggctactgcacaatgcacaccaaccagagtggagctagattcaatgacagaagtgccttctattgcttagagtacttccccagtcaaatgctgagaacggggaataattttgaattcagttttgagtttgaagaagttcccttccatagcatgttcgctcattcacaggatttagataggctaatgaatcctctcctagatcagtacctgtggaatttctctgaggttaatggtggcaggaatgcacagttcaaaaaagctgtgaaaggagcatttggtgcaatggggagaaattggcttccaggacccaagcttctagaccaaagggtaagagtatacagtggaggaacagataactatgcaaactggtcaatcgggactaaaggaaacaaagttttccttaaagacagagagtatctattgcaaccaggtccagtagctactacacatacagaagatcaggcttccagtataccggctcaaaacacaataggaattgcaaaagacccctacaggtcaggcagtactctggcaggaatttcagacattatggtaccagatgagcaagaaatagcaccaactaacggtgtagggtggagaccttatggattgaccgtaaccaatgaacaaaacacaacaacagctcctacaaatgctgagctacaagtactgggagcgctacctggcatggtctggcagaacagagatatttacctgcagggtcctatatgggctaaaatacccaaaacagatgggaaatttcatccttctccaaacctgggaggttttggtctccataatccacctccccaggtctttattaagaatactcctgttcctgcagatcctccagtagagtatgtaaatcagaagtggaattcttacattacacagtattcaacagggcagtgtactgtagaaatggtctgggaactcagaaaagaaaactccaagagatggaaccctgagatccagtttaccagtaactttggaaatagaacaagtactatgtttgctccgaatgagactggaggctatgtagaagataggctgattggtaccaggtatttgactcagaatctgtaa

SEQ ID NO: 243 - DNA, 2199 bp, Goose parvovirus
atgtctacttttttagattcattcgaagagtggtatgagactgcagccgcctcgtggcggaatctgaaagttggagcccctcacccaaaaccaaaccagcagactcagtctgtgtctccagccagagaacccgaacgaagagatagtaaccggggctttgtacttcctggctataagtatcttggccctggtaacggccttgataaagggccgcccgttaataaggcggacagcgtcgcgcttgaacacgacaaggcctacgaccaacagcttaaagcgggagacaacccttatataaaattcaatcacgctgaccaggactttatagatagcctccaagacgaccggtcgttcggaggtaacctcggaaaggccgtattccaggccaaaaaacgtatcctagagccattcggtctagtagaagactcgatcaacacggcacccgtcaaaaaaaatacagggaaacttactgaccattacccggtggttaagaagcctaaacttaccgaggaggtcagtgcaggaggtggtaccagtgcagtacaagacggaggagccaccgcggagggtaccgaacctgtggcagcatctgaaatggcagagggaggaggcggagctttgggcgacgcttcagggggtgccgatggagtgggtaatgcctcgggaaattggcattgcgattcccaatggatgggaaacacagtcatcacaaaaactacccgaacttgggtcttgccgagctacaataaccacatctacaaagcaattaccagcggaacctctcaggacgcaactgtccagtatgctggatacagtactccctgggggtacttcgatttcaaccgcttccactgccacttctccccgagagactggcaaagacttatcaacaaccattggggaatcagacccaagtcccttaaatttaagatcttcaatgtccaagtcaaagaagtcacaacgcaggatcagacgaagaccattgcaaacaatctcacgtcaacgattcaagtgttcacggatgatgagcatcaactcccgtatgtgctgggctcggctacggaaggcaccatgccgccgttcccgtcggatgtgtatgccctgccgcagtacgggtattgcacaatgcacaccaaccagaacggtgcacgattcaatgaccggagtgcattctactgcttagaatacttccccagtcagatgctaagaacaggcaacaactttgagttcacgtttgactttgaagaagttcctttccacagcatgttcgctcattcacaggacttagacaggctgatgaaccccttagtggatcaatacctctggaatttcaatgaggtagacagcagcagaaatgctcaatttaaaaaagctgtgaaaggcgcttatggcaccatgggccgcaattggctgccaggacctaaactcctggaccagagagttagggcctatacaggcggaacagataattatgcaaactggaacatctggagtaatggaaacaaggtcaatttgaaggacaggcagtacctcttgcaacccggacctgtatcagctactcacacaaaagtagaggcttccagcatcccagcccaaaatattttaggtttagctaaagatccatacagatctggcagcactacagcaggaataagtgatattatggtcacggacgagcaggaagtagcacctacaaatggcgtagggtggaaaccatatggcaagactgtaacgaatgaacaaaacactactacagctcctacgagttcagatcttgatgttcttggagctttaccaggaatggtttggcagaacagagatatatatctacagggacctatttgggctaaaataccaaagaccgatggcaaattccatccttctccgaatctcggaggatttggcctgtacaacccaccaccacaggtcttcatcaagaatacaccggtacctgcagaccctccggtagaatacgtacaccagaagtggaattcttacataacccagtattcttcgggccagtgtacagtagagatggtgtgggagctcagaaaagagaattcaaagcggtggaatccagaaattcagttcaccagcaatttcagtgacagaacaagcataatgtttgcacctaatgaaactggtggatacatagaagatagattgattggaaccagatatctaactcaaaatctgtaa

SEQ ID NO: 244 - DNA, 2199 bp, Goose parvovirus
atgtctacttttttagattcattcgaagagtggtatgagactgcagccgcctcgtggcggaatctgaaagctggagcccctcacccaaaaccaaaccagcagactcagtctgtgtctccagccagagaacccgaacgaagagatagtaaccggggctttgtacttcctggctataagtatcttggccctggtaacggccttgataaagggccgcccgttaataaggcggacagcgtcgcgcttgaacacgacaaggcctacgaccaacagcttaaagcgggagacaacccatatataaaattcaatcacgctgaccaggactttatagatagcctccaagacgaccggtcgttcggaggtaacctcggaaaggccgtattccaggccaaaaaacgtatcctagagccattcggtctagtagaagactcgatcaacacggcacccgtcaaaaaaaatacagggaaacttactgaccattacccggtggttaagaagcctaaacttaccgaggaggtcagtgcaggaggtggtaccagtgcagtacaagacggaggagccaccgcggagggtaccgaacctgtggcagcatctgaaatggcagagggaggaggcggagctttgggcgacgcttcagggggtgccgatggagtgggtaatgcctcgggaaattggcattgcgattcccaatggatgggaaacacagtcatcacaaaaactacccgaacttgggtcttgccgagctacaataaccacatctacaaagcaattaccagcggaacctctcaggacgcaactgtccagtatgctggatacagtactccctgggggtacttcgatttcaaccgcttccactgccacttctccccgagagactggcaaagacttatcaacaaccattggggaatcagacccaagtcccttaaatttaagatcttcaatgtccaagtcaaagaagtcacaacgcaggatcagacgaagaccattgcaaacaatctcacgtcaacgattcaagtgttcacggatgatgagcatcaactcccgtatgtgctgggctcggctacggaaggcaccatgccgctgttcccgtcggatgtgtatgccctgccgcagtacgggtattgcacaatgcacaccaaccagaacggtgcacgattcaatgaccggagtgcattctactgcttagaatacttccccagtcagatgctaagaacaggcaacaactttgagttcacgtttgactttgaagaagttcctttccacagcatgttcgctcattcacaggacttagacaggctgatgaaccccttagtggatcaatacctctggaatttcaatgaggtagacagcagcagaaatgctcgatttaaaaacgctgtgaaaggcgcttatggcaccatgggccgcaattggctgccaggacctaaattcctggaccagagagttagggcctatacaggcggaacagataattatgcaaactggaacatctggagtaatggaaacaaggtcaatttgaaggacaggcagtacctcttgcaacccggacctgtatcagctactcacacaaaagtagaggcttccagcatcccagcccaaaatattttaggtttagctaaagatccatacagatctggcagcactacagcaggaataagtgatattatggtcacggacgagcaggaagtagcacctacaaatggcgtagggtggaaaccatatggcaagactgtaacgaatgaacaaaacactactacagctcctacgagttcagatcttgatgttcttggagctttaccaggaatggtttggcagaacagagatatatatctacagggacctatttgggctaaaataccaaagaccgatggcaaattccatccttctccgaatctcggaggatttggcctgtacaacccaccaccacaggtcttcatcaagaatacaccggtacctgcagaccctccggtagaatacgtacaccagaagtggaattcttacataacccagtattcttcgggccagtgtacagtagagatggtgtgggagctcagaaaagagaattcaaagcggtggaatccagaaattcagttcaccagcaatttcagtgacagaacaagcataatgtttgcacctaatgaaactggtggatacgtagaagatagattgattggaaccagatatctaactcaaaatctgtaa

SEQ ID NO: 245 - DNA, 1605 bp, Goose parvovirus
atggcagagggaggaggcggagctttgggcgacgcttcagggggtgccgatggagtgggtaatgcctcgggaaattggcattgcgattcccaatggatgggaaacacagtcatcacaaaaactacccgaacttgggtcttgccgagctacaataaccacatctacaaagcaattaccagcggaacctctcaggacgcaactgtccagtatgctggatacagtactccctgggggtacttcgatttcaaccgcttccactgccacttctccccgagagactggcaaagacttatcaacaaccattggggaatcagacccaagtcccttaaatttaagatcttcaatgtccaagtcaaagaagtcacaacgcaggatcagacgaagaccattgcaaacaatctcacgtcaacgattcaagtgttcacggatgatgagcatcaactcccgtatgtgctgggctcggctacggaaggcaccatgccgccgttcccgtcggatgtgtatgccctgccgcagtacgggtattgcacaatgcacaccaaccagaacggtgcacgattcaatgaccggagtgcattctactgcttagaatacttccccagtcagatgctaagaacaggcaacaactttgagttcacgtttgactttgaagaagttcctttccacagcatgttcgctcattcacaggacttagacaggctgatgaaccccttagtggatcaatacctctggaatttcaatgaggtagacagcagcagaaatgctcaatttaaaaaagctgtgaaaggcgcttatggcaccatgggccgcaattggctgccaggacctaaactcctggaccagagagttagggcctatacaggcggaacagataattatgcaaactggaacatctggagtaatggaaacaaggtcaatttgaaggacaggcagtacctcttgcaacccggacctgtatcagctactcacacaaaagtagaggcttccagcatcccagcccaaaatattttaggtttagctaaagatccatacagatctggcagcactacagcaggaataagtgatattatggtcacggacgagcaggaagtagcacctacaaatggcgtagggtggaaaccatatggcaagactgtaacgaatgaacaaaacactactacagctcctacgagttcagatcttgatgttcttggagctttaccaggaatggtttggcagaacagagatatatatctacagggacctatttgggctaaaataccaaagaccgatggcaaattccatccttctccgaatctcggaggatttggcctgtacaacccaccaccacaggtcttcatcaagaatacaccggtacctgcagaccctccggtagaatacgtacaccagaagtggaattcttacataacccagtattcttcgggccagtgtacagtagagatggtgtgggagctcagaaaagagaattcaaagcggtggaatccagaaattcagttcaccagcaatttcagtgacagaacaagcataatgtttgcacctaatgaaactggtggatacatagaagatagattgattggaaccagatatctaactcaaaatctgtaa

SEQ ID NO: 246 - DNA, 1605 bp, Goose parvovirus
atggcagagggaggaggcggagctttgggcgacgcttcagggggtgccgatggagtgggtaatgcctcgggaaattggcattgcgattcccaatggatgggaaacacagtcatcacaaaaactacccgaacttgggtcttgccgagctacaataaccacatctacaaagcaattaccagcggaacctctcaggacgcaactgtccagtatgctggatacagtactccctgggggtacttcgatttcaaccgcttccactgccacttctccccgagagactggcaaagacttatcaacaaccattggggaatcagacccaagtcccttaaatttaagatcttcaatgtccaagtcaaagaagtcacaacgcaggatcagacgaagaccattgcaaacaatctcacgtcaacgattcaagtgttcacggatgatgagcatcaactcccgtatgtgctgggctcggctacggaaggcaccatgccgccgttcccgtcggatgtgtatgccctgccgcagtacgggtattgcacaatgcacaccaaccagaacggtgcacgattcaatgaccggagtgcattctactgcttagaatacttccccagtcagatgctaagaacaggcagcaactttgagttcacgtttgactttgaagaagttcctttccacagcatgttcgctcattcacaggacttagacaggctgatgaaccccttagtggatcaatacctctggaatttcaatgaggtagacagcagcagaaaagctcaatttaaaaaagctgtgaaaggcgcttatggcaccatgggccgcaattggctgccaggacctaaactcctggaccagagagttagggcctatacaggcggaacagataattatgcaaactggaacatctggagtaatggaaacaaggtcaatttgaaggacaggcagtacctcttgcaacccggacctgtatcagctactcacacaaaagtagaggcttccagcatcccagcccaaaatattttaggtttagctaaagatccatacagatctggcagcactacagcaggaataagtgatattatggtcacggacgagcaggaagtagcacctacaaatggcgtagggtggaaaccatatggcaagactgtaacgaatgaacaaaacagtactacagctcctacgagttcagatcttgatgttcttggagctttaccaggaatggtttggcagaacagagatatatatctacagggacctatttgggctaaaataccaaagaccgatggcaaattccatccttctccgaatctcggaggatttggcctgtacaacccaccaccacaggtcttcatcaagaatacaccggtacctgcagaccctccggtagaatacgtacaccagaagtggaattcttacataacccagtattcttcgggccagtgtacagtagagatggtgtgggagctcagaaaagagaattcaaagcggtggaatccagaaattcagttcaccagcaatttcagtgacagaacaagcataatgtttgcacctaatgaaactggtggatacatagaagatagattgattggaaccagatatctaactcaaaatctgtaa

SEQ ID NO: 247 - DNA, 1605 bp, Goose parvovirus
atggcagagggaggaggcggagctttgggcgacgcttcagggggtgccgatggagtgggtaatgcctcgggaaattggcattgcgattcccaatggatgggaaacacagtcatcacaaagaccaccagaacctgggtcctcccaagctacaacaaccacatctacaaagcgattaccagtggaacctctcaagatgcaaatgtccagtatgcaggatacagtaccccctgggggtactttgatttcaaccgcttccactgccacttctcccctagagactggcagagacttatcaacaaccattggggaatcagacccaagtctcttaaattcaagatcttcaatgtccaagtcaaagaagtcacaacgcaggatcagacgaagaccattgcaaacaatctcacgtcaacaattcaagtctttacggatgacgagcatcaactcccgtatgtcctgggctcggctacggaaggcaccatgccgccgttcccgtcggatgtctatgccctgccgcagtacgggtattgcacaatgcacaccaaccagaatggagcacgattcaatgaccggagtgcattctactgcttagaatacttccccagtcagatgctaagaacaggcaacaactttgagtttacgtttgactttgaagaagttcctttccacagcatgttcgctcattcacaggacttagacaggctgatgaaccccttagtggatcaatacctctggaatttcaatgaggtagacagcagcagaaatgctcaatttaaaaaggctgtgaaaggcgcttatggcaccatgggccgcaattggctgccaggacctaaattcctggaccagagagttagggcctatacaggcggaacagataattatgcaaactggaacatctggagtaatggaaacaaggttaatttgaaggacaggcagtacctcctgcaacccggacctgtatcagctactcacacagaagcagaggcttccagccttccagctcaaaatattttaggtttagctaaagatccatacagatctggcagcactacagcaggaataagtgatattatggtcacggacgagcaggaagtagcacctacaaacggcgtagggtggaaaccatatggcaagactgtaacgaatgaacaaaacactactacagctcctacaagttcagatctggatgttcttggagctttaccaggaatggtttggcagaacagggatatatatctgcagggacctatttgggcaaaaataccgaagactgatggtaaattccatccttctccgaatctcggaggttttggtctgcacaatccaccaccgcaggtgttcatcaagaatacaccagtgcctgcagaccctccagtagaatacgtgcaccagaagtggaattcctacataacccagtactctacgggccagtgtacagtagagatggtgtgggagctgagaaaagagaattcaaagagatggaacccagaaatccagttcaccagtaatttcagtgacagaacaagcataatgtttgcacctaatgaaactggtggatatgtagaagatagattaattggaaccagatatctaactcaaaatctgtaa

SEQ ID NO: 248 - DNA, 1605 bp, Goose parvovirus
atggcagagggaggaggcggagctttgggcgactcttcagggggtgccgatggagtgggtaatgcctcgggaaattggcattgcgattcccaatggatgggaaacacagtcatcacaaagaccaccagaacctgggtcctgccaagctacaacaaccacatctacaaagcgattaccagtggaacctctcaagatgcaaatgtccagtatgcaggatacagtaccccctgggggtactttgatttcaaccgcttccactgccacttctcccctagagactggcagagacttatcaacaaccattggggaatcagacccaagtctcttaaattcaagatcttcaatgtccaagtcaaagaagtcacaacgcaggatcagacaaagaccattgcaaacaatctcacctcgacaattcaagtctttacggatgacgagcatcaactcccgtatgtcctgggctcggctacggaaggcaccatgccgccgttcccgtcggatgtctatgccctgccgcagtacgggtactgcacaatgcacaccaaccagaatggagcacgattcaatgaccggagtgcattctactgcttagaatacttccccagtcagatgctaagaacaggcaacaactttgagtttacgtttgactttgaagaagttcctttccacagcatgttcgctcattcacaggacttagacaggctgatgaaccccttagtggatcaatacctctggaatttcaatgaggtagacagcagcagaaatgctcaatttaaaaaggctgtgaaaggcgcttatggcaccatgggccgcaattggctgccaggacctaaattcctggaccagagagttagggcctatacaggcggaacagataattatgcaaactggaacatctggagtaatggaaacaaggttaatttgaaggacaggcagtacctcctgcaacccggacctgtatcagctactcacacagaagcagaggcttccagccttccagctcaaaatatgttaggtttagctaaagatccatacagatctggcagcactacagcaggaataagtgatattatggtcacggacgagcaggaagtagcacctacaaacggcgtagggtggaaaccatatggcaagactgtaacgaatgaacaaaacactactacagctcctacaagttcagatctggatgttcttggagctttaccaggaatggtttggcagaacagggatatatatctgcagggacctatttgggcaaaaataccgaagactgatggtaaattccatccttctccgaatctcggaggatttggtctgcacaatccaccaccgcaggtgttcatcaagaatacaccagtgcctgcagaccctccagtagaatacgtgcaccagaagtggaattcctacataacccagtactctacgggccagtgtacagtagagatggtgtgggagctgagaaaagagaattcaaagagatggaacccagaaatccagttcaccagtaatttcagtgacagaacaagcataatgtttgcacctaatgaaactggtggatatgtagaagatagattaattggaaccagatatctaactcaaaatctgtaa

SEQ ID NO: 249 - DNA, 1605 bp, Goose parvovirus
atggcagagggaggaggcggagctttgggcgacgcttcagggggtgccgatggagtgggtaatgcctcgggaaattggcattgcgattcccaatggatgggaaacacagtcatcacaaagaccaccagaacctgggtcctgcccagctacaacaaccacatctacaaagcgattaccagtggaacctctcaagatgcaaatgtccagtatgcaggatacagtaccccctgggggtactttgatttcaaccgcttccactgccacttctcccctagagactggcagagacttatcaacaaccattggggaatcagacccaagtctcttaaattcaagatcttcaatgtgcaagtcaaagaagtcacaacgcaggatcagacgaagaccattgcaaacaatctcacgtcaacaattcaagtctttacggatgacgagcatcaactcccgtatgtcctgggctcggctacggaaggcaccatgccgccgttcccgtcggatgtctatgccctgccgcagtacgggtattgcacaatgcacaccaaccagaatggagcacgattcaatgaccggagtgcattctactgcttagaatacttccccagtcagatgctaagaacaggcaacaactttgagttcacgtttgactttgaagaagttcctttccacagcatgttcgctcattcacaggacttagacaggctgatgaaccccttagtggatcaatacctctggaatttcaatgaggtagacagcagcagaaatgctcaatttaaaaaggctgtgaaaggcgcttatggcaccatgggccgcaattggctgccaggaccaaaattcctggaccagagagttagggcctatacaggcggaacagataattatgcaaactggaacatctggagtaatggaaacaaggttaatttgaaggacaggcagtacctcctgcaacccggacctgtatcagctactcacacagaagcagaggcttccagccttccagctcaaaatattttaggtttagctaaagatccatacagatctggcagcactacagcaggaataagtgatattatggtcacggacgagcaggaagtagcacctacaaacggcgtagggtggaaaccatatggcaagactgtaacgaatgaacaaaacactactacagctcctacaagttcagatctggatgttcttggagctttaccaggaatggtttggcagaacagggatatatatctgcagggacctatttgggcaaaaataccgaagactgatggtaaattccatccttctccgaatctcggaggttttggtctgcacaatccaccaccgcaggtgttcatcaagaatacaccagtgcctgcagaccctccagtagaatacgtgcaccagaagtggaattcctacataacccagtactctacgggccagtgtacagtagagatggtgtgggagctgagaaaagagaattcaaagagatggaacccagaaatccagttcaccagtaatttcagtgacagaacaagcataatgtttgcacctaatgaaactggtggatatgtagaagatagattaattggaaccagatatctaactcaaaatctgtaa

SEQ ID NO: 250 - DNA, 1605 bp, Goose parvovirus
atggcagagggaggaggcggagctttgggcgacgcttcagggggtgccgatggagtgggtaatgcctcgggaaattggcattgcgattcccaatggatgggaaacacagtcatcacaaagaccaccagaacctgggtcctgccaagctacaacaaccacatctacaaagcgattaccagtggaacctctcaagatgcaaatgtccagtatgcaggatacagtaccccctgggggtactttgatttcaaccgcttccactgccacttctcccctagagactggcagagacttatcaacaaccattggggaatcagacccaagtctcttaaattcaagatcttcaatgtccaagtcaaagaagtcacaacgcaggatcagacgaagaccattgcaaacaatctcacgtcaacaattcaagtctttacggatgacgagcatcaactcccctatgtcctgggctcggctacggaaggcaccatgccgccgttcccgtcggatgtctatgccctgccgcagtacgggtattgcacaatgcacaccaaccagaatggagcacgattcaatgaccggagtgcattctactgcttagaatacttccccagtcagatgctaagaacaggcaacaactttgagttcacgtttgactttgaagaagttcctttccacagcatgttcgctcattcacaggacttagacaggctgatgaaccccttagtggatcaatacctctggaatttcaatgaggtagacagcagcagaaatgctcaatttaaaaaggctgtgaaaggcgcttatggcaccatgggccgcaattggctgccaggacctaaattcctggaccagagagttagggcctatacaggcggaactgataattatgcaaactggaacatctggagtaatggaaacaaggttaatttgaaggacaggcagtacctcctgcaacccggacctgtatcagctactcacacagaagcagaggcttccagccttccagctcaaaatattttaggtttagctaaagatccatacagatctggcagcactacagcaggaataagtgatattatggtcacggacgagcaggaagtagcacctacaaacggcgtagggtggaaaccatatggcaagactgtaacgaatgaacaaaacactactacagctcctacaagttcagatctggatgttcttggagctttaccaggaatggtttggcagaacagggatatatatctgcagggacctatttgggcaaaaataccgaagactgatggtaaattccatccttctccgaatctcggaggttttggtctgcacaatccaccaccgcaggtgttcatcaaggatacaccagtgcctgcagaccctccagtagaatacgtgcaccagaagtggaattcctacataacccagtactctacgggccagtgtacagtagagatggtgtgggagctgagaaaagagaattcaaagagatggaacccagaaatccagttcaccagtaatttcagtgacagaacaagcataatgtttgcacctaatgaaactggtggatatgtagaagatagattaattggaaccagatatctaactcaaaatctgtaa

SEQ ID NO: 251 - DNA, 1605 bp, Goose parvovirus
atggcagagggaggaggcggagctttgggcgacgcttcagggggtgccgatggagtgggtaatgcctcgggaaattggcattgcgattcccaatggatgggaaacacagtcatcacaaagaccaccagaacctgggtcctgccaagctacaacaaccacatctacaaagcgattaccagtggaacctctcaagatgcaaatgtccagtatgcaggatacagtaccccctgggggtactttgatttcaaccgcttccactgccacttctcccctagagactggcagagacttatcaacaaccattggggaatcagacccaagtctcttaaattcaagatcttcaatgtccaagtcaaagaagtcacaacgcaggatcagacgaagaccattgcaaacaatctcacgtcaacaattcaagtctttacggatgacgagcatcaactcccctatgtcctgggctcggctacggaaggcaccatgccgccgttcccgtcggatgtctatgccctgccgcagtacgggtattgcacaatgcacaccaaccagaatggagcacgattcaatgaccggagtgcattctactgcttagaatacttccccagtcagatgctaagaacaggcaacaactttgagttcacgtttgactttgaagaagttcctttccacagcatgttcgctcattcacaggacttagacaggctgatgaaccccttagtggatcaatacctctggaatttcaatgaggtagacagcagcagaaatgctcaatttaaaaaggctgtgaaaggcgcttatggcaccatgggccgcaattggctgccaggacctaaattcctggaccagagagttagggcctatacaggcggaacagataattatgcaaactggaacatctggagtaatggaaacaaggttaatttgaaggacaggcagtacctcctgcaacccggacctgtatcagctactcacacagaagcagaggcttccagccttccagctcaaaatattttaggtttagctaaagatccatacagatctggcagcactacagcaggaataagtgatattatggtcacggacgagcaggaagtagcacctacaaacggcgtagggtggaaaccatatggcaagactgtaacgaatgaacaaaacactactacagctcctacaagttcagatctggatgttcttggagctttaccaggaatggtttggcagaacagggatatatatctacagggacctatttgggcaaaaataccgaagactgatggtaaattccatccttctccgaatctcggaggatttggtctgcacaatccaccaccgcaggtgttcatcaagaatacaccagtgcctgcagaccctccagtagaatacgtgcaccagaagtggaattcctacataacccagtactctacgggccagtgtacagtagagatggtgtgggagctgagaaaagagaattcaaagagatggaacccagaaatccagttcaccagtaatttcagtgacagaacaagcataatgtttgcacctaatgaaactggtggatatgtagaagatagattaattggaaccagatatctaactcaaaatctgtaa

SEQ ID NO: 252 - DNA, 1605 bp, Goose parvovirus
atggcagagggaggaggcggagctttgggcgacgcttcagggggtgccgatggagtgggtaatgcctcgggaaattggcattgcgattcccaatggatgggaaacacagtcatcacaaagaccaccagaacctgggtcctcccaagctacaacaaccacatctacaaagcgattaccagtggaacctctcaagatgcaaatgtccagtatgtaggatacagtaccccctgggggtactttgatttcaaccgcttccactgccacttctcccctagagactggcagagacttatcaacaaccattggggaatcagacccaagtctcttaaattcaagatcttcaatgtccaagtcaaagaagtcacaacgcaggatcagacgaagaccattgcaaacaatctcacgtcaacaattcaagtctttacggatgacgagcatcaactcccgtatgtcctgggctcggctacggaaggcaccatgccgccgttcccgtcggatgtctatgccctgccgcggtacgggtattgcacaatgcacaccaaccagaatggagcacgattcaatgaccggagtgcattctactgcttagaatacttccccagtcagatgctaagaacaggcaacaactttgagttcacgtttgactttgaagaagttcctttccacagcatgttcgctcattcacaggacttagacaggctgatgaaccccttagtggatcaatacctctggaatttcaatgaggtagacagcagcagaaatgctcaatttaaaaaggctgtgaaaggcgcttatggcaccatgggccgcaattggctgccaggacctaaattcctggaccagagagttagggcctatacaggcggaacagataattatgcaaactggaacatctggagtaatggaaacaaggttaatttgaaggacaggcagtacctcctgcaacccggacctgtatcagctactcacacagaagcagaggcttccagccttccagctcaaaatatgttaggtttagctaaagatccatacagatctggcagcactacagcaggaataagtgatattatggtcacggacgagcaggaagtagcacctacaaacggcgtagggtggaaaccatatggcaagactgtaacgaatgaacaaaacactactacagctcctacaagttcagatctggatgttcttggagctttaccaggaatggtttggcagaacagggatatatatctgcagggacctatttgggcaaaaataccgaagactgatggtaaattccatccttctccgaatctcggaggatttggtctgcacaatccaccaccgcaggtgttcatcaagaatacaccagtgcctgcagaccctccagtagaatacgtgcaccagaagtggaattcctacataacccagtactctacgggccagtgtacagtagagatggtgtgggagctgagaaaagagaattcaaagagatggaacccagaaatccagttcaccagtaatttcagtgacagaacaagcataatgtttgcacctaatgaaactggtggatatgtagaagatagattaattggaaccagatatctaactcaaaatctgtaa

SEQ ID NO: 253 - DNA, 1605 bp, Goose parvovirus
atggcagagggaggaggcggagctttgggcgacgcttcagggggtgccgatggagtgggtaatgcctcgggaaattggcattgcgattcccaatggatgggaaacacagtcatcacaaaaactacccgaacttgggtcttgccgagctacaataaccacatctacaaagcaattaccagcggaacctctcaggacgcaactgtccagtatgctggatacagtactccctgggggtacttcgatttcaaccgcttccactgccacttctccccgagagactggcaaagacttatcaacaaccattggggaatcagacccaagtcccttaaatttaagatcttcaatgtccaagtcaaagaagtcacaacgcaggatcagacgaagaccattgcaaacaatctcacgtcaacgattcaagtgttcacggatgatgagcatcaactcccgtatgtgctgggctcggctacggaaggcaccatgccgccgttcccgtcggatgtgtatgccctgccgcrgtacrggtattgcacaatgcacaccaaccagaatggagcacgattcaatgaccggagtgcattctactgcttagaatacttccccagtcagatgctaagaacaggcaacaactttgagttcacgtttgactttgaagaagttcctttccacagcatgttcgctcattcacaggacttagacaggctgatgaaccccttagtggatcaatacctctggaatttcaatgaggtagacagcagcagaaatgctcaatttaaaaaggctgtgaaaggcgcttatggcaccatgggccgcaattggctgccaggacctaaattcctggaccagagagttagggcctatacaggcggaactgataattatgcaaactggaacatctggagtaatggaaacaaggttaatttgaaggacaggcagtacctcctgcaacccggacctgtatcagctactcacacagaagcagaggcttccagccttccagctcaaaatattttaggtttagctaaagatccatacagatctggcagcactacagcaggaataagtgatattatggtcacggacgagcaggaagtagcacctacaaacggcgtagggtggaaaccatatggcaagactgtaacgaatgaacaaaacactactacagctcctacaagttcagatctggatgttcttggagctttaccaggaatggtttggcagaacagggatatatatctgcagggacctatttgggcaaaaataccgaagactgatggtaaattccatccttctccgaatctcggaggttttggtctgcacaatccaccaccgcaggtgttcatcaaggatacaccagtgcctgcagaccctccagtagaatacgtgcaccagaagtggaattcctacataacccagtactctacgggccagtgtacagtagagatggtgtgggagctgagaaaagagaattcaaagagatggaacccagaaatccagttcaccagtaatttcagtgacagaacaagcataatgtttgcacctaatgaaactggtggatatgtagaagatagattaattggaaccagatatctaactcaaaatctgtaa

SEQ ID NO: 254 - DNA, 1646 bp, Goose parvovirus
tgaaatggcagagggaggaggcggagctttgggcgacgcttcagggggtgccgatggagtgggtaatgcctcgggaaattggcattgcgattcccaatggatgggaaacacagtcatcacaaaaactacccgaacttgggtcttgccgagctacaataaccacatctacaaagcaattaccagcggaacctctcaggacgcaactgtccagtatgctggatacagtactccctgggggtacttcgatttcaaccgcttccactgccacttctccccgagagactggcaaagacttatcaacaaccattggggaatcagacccaagtcccttaaatttaagatcttcaatgtccaagtcaaagaagtcacaacgcaggatcagacgaagaccattgcaaacaatctcacgtcaacgattcaagtgttcacggatgatgagcatcaactcccgtatgtgctgggctcggctacggaaggcaccatgccgccgttcccgtcggatgtgtatgccctgccgcagtacgggtattgcacaatgcacaccaaccagaacggtgcacgattcaatgaccggagtgcattctactgcttagaatacttccccagtcagatgctaagaacaggcaacaactttgagttcacgtttgactttgaagaagttcctttccacagcatgttcgctcattcacaggacttagacaggctgatgaaccccttagtggatcaatacctctggaatttcaatgaggtagacagcagcagaaatgctcgatttaaaaaagctgtgaaaggcgcttatggcaccatgggccgcaattggctgccaggacctaaactcctggaccagagagttagggcctatacaggcggaacagataattatgcaaactggaacatctggagtaatggaaacaaggtcaatttgaaggacaggcagtacctcttgcaacccggacctgtatcagctactcacacaaaagtagaggcttccagcatcccagcccaaaatattttaggtttagctaaagatccatacagatctggcagcactacagcaggaataagtgatattatggtcacggacgagcaggaagtagcacctacaaatggcgtagggtggaaaccatatggcaagactgtaacgaatgaacaaaacactactacagctcctacgagttcagatcttgatgttcttggagctttaccaggaatggtttggcagaacagagatatatatctacagggacctatttgggctaaaataccaaagaccgatggcaaattccatccttctccgaatctcggaggatttggcctgtacaacccaccaccacaggtcttcatcaagaatacaccggtacctgcagaccctccggcagaatacgtacaccagaagtggaattcttacataacccagtattctacgggccagtgtacaatagagatggtgtgggagctcagaaaagagaattcaaagcggtggaatccagaaattcagttcaccagcaatttcagtgacagaacaagcataatgtttgcacctaatgaaactggtggatacatagaagatagattgattggaaccagatatctaactcaaaatctgtaatgtctgtaaaaagattcaaataaagcacttcctggcg

SEQ ID NO: 255 - DNA, 1764 bp, Goose parvovirus
acggcacctgcaaaaaaaaatacagggaagcttaccgaccactacccggtagttaagaagcctaaacttaccgaggaagtcagtgcgggaggtggtagtagtgccgtacaagacggaggagccaccgcggagggcaccgaacctgtggcagcatctgaaatggcagagggaggaggcggagctttgggcgacgcttcagggggtgccgatggagtgggtaatgcctcgggaaattggcattgcgattcccaatggatgggaaacacagtcatcacaaagaccaccagaacctgggtcctgccaagctacaacaaccacatctacaaagcgattaccagtggaacctctcaagatgcaaatgtccagtatgcaggatacagtaccccttggggatactttgatttcaaccgcttccactgccacttctcccctagagactggcagagacttatcaacaaccattggggaatcagacccaagtctcttaaattcaagatcttcaatgtccaagtcaaagaagtcacaacgcaggatcagacgaagaccattgcaaacaatctcacgtcaacaattcaagtctttacggatgacgagcatcaactcccgtatgtcctgggctcggctacggaaggcaccatgccgccgttcccgtcggatgtctatgccctgccgcagtacgggtattgcacaatgcacaccaaccagaacggtgcacgattcaatgaccggagtgcattctactgcttagaatacttccccagtcagatgctaagaacaggcaacaactttgagttcacgtttgactttgaagaagttcctttccacagcatgttcgctcattcacaggacttagacaggctgatgaaacccatagtggatcaatacctctggaatttcaatgaggtagacagcagcagaaatgctcaatttaaaaaggctgtgaaaggcgcttatggaaccatgggccgcaattggctgccaggacctaaattcctggaccagagagttagggcctatacaggcggaacagataattatgcaaactggaacatctggagtaatggaaacaaggttaatttgaaggacaggcagtacctcctgcaacccggacctgtatcagctactcatacagaagcagaggcttccagtatcccagcccaaaatattttaggtttagctaaagatccatacagatctggcagcactacagcaggaataagtgatattatggtcacggacgagcaggaagtagcacctacaaacggcgtagggtggaaaccatatggcaagactgtaacgaatgaacaaaacactactacagctcctacaagttcagatctggatgttcttggagctttaccaggaatggtttggcagaacagggatatatatctgcagggacctatttgggcaaaaataccgaagactgatggtaaattccatccttctccgaatctcggaggatttggtctgcacaatccaccaccgcaggtgttcatcaagaatacaccagtgcctgcagaccctccagtagaatacgtgcaccagaagtggaattcctacataacccagtactctacgggccagtgtacagtagagatggtgtgggagctgagaaaagagaattcaaagagatggaacccagaaatccagttcaccagtaatttcagtgacagaacaagcataatgtttgcacctaatgaaactggtggatatgtagaagatagattaattggaaccagatatctaactcaaaatctgtaa

SEQ ID NO: 256 - DNA, 2199 bp, Goose parvovirus
atgtctacttttttagattcattcgaagagtggtatgagactgcagccgcctcgtggcggaatctgaaagctggagcccctcacccaaaaccaaaccagcagactcagtctgtgtctccagccagagaacccgaacgaagagatagtaaccggggctttgtacttcctggctataagtatcttggccctggtaacggccttgataaagggccgcccgttaataaggcggacagcgtcgcgcttgaacacgacaaggcctacgaccaacagcttaaagcgggagacaacccatatataaaattcaatcacgctgaccaggactttatagatagcctccaagacgaccggtcgttcggaggtaacctcggaaaggccgtattccaggccaaaaaacgtatcctagagccattcggtctagtagaagactcgatcaacacggcacccgtcaaaaaaaatacagggaaacttactgaccattacccggtggttaagaagcctaaacttaccgaggaggtcagtgcaggaggtggtaccagtgcagtacaagacggaggagccaccgcggagggtaccgaacctgtggcagcatctgaaatggcagagggaggaggcggagctttgggcgacgcttcagggggtgccgatggagtgggtaatgcctcgggaaattggcattgcgattcccaatggatgggaaacacagtcatcacaaaaactacccgaacttgggtcttgccgagctacaataaccacatctacaaagcaattaccagcggaacctctcaggacgcaactgtccagtatgctggatacagtactccctgggggtacttcgatttcaaccgcttccactgccacttctccccgagagactggcaaagacttatcaacaaccattggggaatcagacccaagtcccttaaatttaagatcttcaatgtccaagtcaaagaagtcacaacgcaggatcagacgaagaccattgcaaacaatctcacgtcaacgattcaagtgttcacggatgatgagcatcaactcccgtatgtgctgggctcggctacggaaggcaccatgccgccgttcacgtcggatgtgtatgccctgccgcagtacgggtattgcacaatgcacaccaaccagaacggtgcacgattcaatgaccggagtgcattctactgcttagaatacttccccagtcagatgctaagaacaggcaacaactttgagttcacgtttgactttgaagaagttcctttccacagcatgttcgctcattcacaggacttagacaggctgatgaaccccttagtggatcaatacctctggaatttcaatgaggtagacagcagcagaaatgctcaatttaaaaaagctgtgaaaggcgcttatggcaccatgggccgcaattggctgccaggacctaaattcctggaccagagagttagggcctatacaggcggaacaaataattatgcaaactggaacatctggagtaatggaaacaaggtcaatttgaaggacaggcagtacctcttgcaacccggacctgtatcagctactcacacaaaagtagaggcttccagcatcccagcccaaaatattttaggtttagctaaagatccatacagatctggcagcactacagcaggaataagtgatattatggtcacggacgagcaggaagtagcacctacaaatggcgtagggtggaaaccatatggcaagactgtaacgaatgaacaaaacactactacagctcctacgagttcagatcttgatgttcttggagctttaccaggaatggtttggcagaacagagatatatatctacagggacctatttgggctaaaataccaaagaccgatggcaaattccatccttctccgaatctcggaggatttggcctgtacaacccaccaccacaggtcttcatcaagaatacaccggtacctgcagaccctccggtagaatacgtacaccagaagtggaattcttacataacccagtattcttcgggccagtgtacagtagagatggtgtgggagctcagaaaagagaattcaaagcggtggaatccagaaattcagttcaccagcaatttcagtgacagaacaagcataatgtttgcacctaatgaaactggtggatacgtagaagatagattgattggaaccagatatctaactcaaaatctgtaa

SEQ ID NO: 257 - DNA, 2199 bp, Goose parvovirus
atgtctacttttttagattcttttgaagagtggtatgagactgcagccgcctcgtggcggaatctgaaagctggagcccctcagccaaaaccaaaccagcagtctcagtctgtgtctccagacagagaacccgaacgaagagataataatcggggctttgtacttcctggctataagtatcttgggcctggtaacggccttgataaaggcccacctgtcaataacgcggacagcgtcgcgcttgaacacgacaaggcctacgaccagcagcttaaagcgggagacaatccatatataaaattcaatcacgctgaccaggactttatagatagtctccaagacgaccagtcattcggaggtaatcttggaaaggctgtatttcaggccaaaaaacgtatcttagagccatttggcctagtagaagatcctatcaacacggcacctgcaaaaaaaaatacagggaagcttactgaccattacccggtagttaagaagcctaaacttaccgaggaagtcagtgcgggaggtggtagcagtgccgtagaagacggaggagccaccgcggagggcaccgaacctgtggcagcatctgaaatggcagagggaggaggcggagctatgggcgactcttcagggggtgccgatggagtgggtaatgcctcgggaaattggcattgcgattcccaatggatgggaaacacagtcatcacaaagaccaccagaacctgggtcctgccaagctacaacaaccacatctacaaagcaattaccagtggaacctctcaagatgcaaatgtccagtatgcaggatacagtaccccctgggggtactttgatttcaaccgcttccactgccacttctcccctagagactggcagagacttatcaacaaccattggggaatccgacccaaatctcttaaattcaagatcttcaatgtccaagtcaaagaagtcacaacgcaggatcaaacaaagaccattgcaaacaatctcacctcaacgattcaagtctttacggatgatgagcatcaactcccgtatgtcctgggctcggctacggaaggcaccatgccgccgttcccgtcggatgtctatgccctgccgcagtacgggtactgcacaatgcacaccaaccagaatggagcacggttcaatgaccgtagtgcattctactgcttagagtacttccctagtcagatgctaagaacaggcaacaactttgagttcacatttgactttgaagaagttcctttccatagcatgttcgctcattcacaggacctagacaggctgatgaaccccctagtggatcaatacctctggaatttcaatgaggtagacagcagcagaaatgctcaatttaaaaaggctgtgaaaggggcgtatagcaccatgggccgcaattggctgccaggacctaaattcctggatcaaagagttagggcctacgcaggaggaacagacaactatgcaaactggaacatctggagtaatgggaacaaggtgaatttaaaagacaggcagtatctcctacaacccggacctgtgtcagcgactcacacagaaggggaggcttccagcattccagctcaaaatattttagggatagctaaagatccatacagatctggcagcactacagcaggaataagtgacattatggtcacggaagaacaagaagtagcacctacaaatggagtagggtggaaaccatatggtaggactgtaacggataaacagaacactactacagctcctaaaagctcagatctggaagttcttggagctttaccaggaatggtttggcagaacagggatatatatctgcagggacctatttgggcaaaaataccgaagactgatggcaaattccatccttctccgaatctcggaggatttggcctgcacaatccaccaccgcaggtgttcatcaagaatacaccagtgcctgcagaccctccagtagaatacgtgcaccagaagtggaattcctacataactcagtactctacgggccagtgtacagtagagatggtgtgggagctgagaaaagagaattcaaagagatggaacccagaaatccagttcaccagtaatttcagtaacagaacaagcataatgtttgcacctaatgaaactggtggatatgtagaagatagattgattggaaccagatatctaactcaaaatctgtaa

SEQ ID NO: 258 - DNA, 2199 bp, Goose parvovirus
atgtctacttttttagattcttttgaagagtggtatgagactgcagccgcctcgtggcggaatctgaaagctggagcccctcacccaaaaccaaaccagcagactcagtctgtgtctccagccagagaacccgaacgaagagataataaccggggctttgtacttcctggctataggtatcttggccctggtaacggccttgataaagggccacccgttaataaggcggacagcgtcgcgcttgaacacgacaaggcctacgaccaacagcttaaagcgggcgacaacccatatataaaattcaatcacgctgaccaggactttatagatagcctccaagacgaccagtcgttcggaggtaatcttggaaaggctgtatttcaggccaaaaaacgtatcttagaaccatttggcctagtagaagatcctgtcaacacggcacctgcaaaaaaaaatacagggaagcttaccgaccactacccggtagttaagaagcctaaacttaccgaggaagtcagtgcgggaggtggtagtagtgccgtacaagacggaggagccaccgcggagggcaccgaacctgtggcagcatctgaaatggcagagggaggaggcggagctttgggcgacgcttcagggggtgccgatggagtgggtaatgcctcgggaaattggcattgcgattcccaatggatgggaaacacagtcatcacaaagaccaccagaacctgggtcctgccaagctacaacaaccacatctacaaagcgattaccagtggaacctctcaagatgcaaatgcccagtatgcaggatacagtaccccctgggggtactttgatttcaaccgcttccactgccacttctcccctagagactggcagagacttatcaacaaccattggggaatcagacccaagtctcttaaattcaagatcttcaatgtccaagtcaaagaagtcacaacgcaggatcagacgaagaccattgcaaacaatctcacgtcaacaattcaagtctttacggatgacgagcatcaactcccgtatgtcctgggctcggctacggaaggcaccatgccgccgttcccgtcggatgtctatgccctgccgcagtacgggtactgcaccatgcacaccaaccagaatggagcacggttcaatgaccgtagtgcattctactgcttagagtacttccctagtcagatgctaagaacaggcaacaactttgagttcacatttgactttgaagaagttcctttccatagcatgttcgctcattcacaggacttagacaggctgatgaaccccctagtggatcaatacctctggaatttcaatgaggtagacagcaggagaaatgctcaatttaaaaaggctgtgaaaggcgcttatggcaccatgggccgcaattggctgccaggacctaaattcctggaccagagagttagggcctatacaggcggaacagataattatgcaaactggaacatctggagtaatggaaacaaggttaatttgaaggacaggcagtacctcctgcaacctggacctgtatcagctactcacacaaaagcagaggcttccagcatcccagcccaaaatattttaggtttagctaaagatccatacagatctggcagcactacagcaggaataagtgatattatggtcacggacgagcaggaagtagcacctacaaacggcgtagggtggaaaccatatggcaagagtgtaacgaatgaacaaaacactactacagctcctacgagttcagatcttgatgttcttggagctttaccaggaatggtttggcagaacagagatatatatctacagggacctatttgggctaaaataccaaagaccgatggcaaattccatccttctccgaatctcggaggatttggcctgcacaatccaccaccgcaggtgttcatcaagaatacaccagtgcctgcagaccctccagtagaatacgtgcaccagaagtggaattcctacataacccagtactctacgggccagtgtacagtagagatggtgtgggagctgagaaaagagaattcaaagagatggaacccagaaatccagttcaccagtaatttcagtgacagaacaagcataatgtttgcacctaatgaaactggtggatacatagaagatagattgattggaaccagatatctaactcaaaatctgtaa

SEQ ID NO: 259 - DNA, 1605 bp, Goose parvovirus
atggcagagggaggaggcggagctttgggcgacgcttcagggggtgccgatggagtgggtaatgcctcgggaaattggcattgcgattcccaatggatgggaaacacagtcatcacaaaaactacccgaacttgggtcttgccgagctacaataaccacatctacaaagcaattaccagcggaacctctcaggacgcaactgtccagtatgctggatacagtactccctgggggtacttcgatttcaaccgcttccactgccacttctccccgagagactggcaaagacttatcaacaaccattggggaatcagacccaagtcccttaaatttaagatcttcaatgtccaagtcaaagaagtcacaacgcaggatcagacgaagaccattgcaaacaatctcacgtcaacgattcaagtgttcacggatgatgagcatcaactcccgtatgtgctgggctcggctacggaaggcaccatgccgccgttcccgtcggatgtgtatgccctgccgcagtacgggtattgcacaatgcacaccaaccagaacggtgcacgattcaatgaccggagtgcattctactgcttagaatacttccccagtcagatgctaagaacaggcaacaactttgagttcacgtttgactttgaagaagttcctttccacagcatgttcgctcattcacaggacttagacaggctgatgaaccccttagtggatcaatacctctggaatttcaatgaggtagacagcagcagaaatgctcaatttaaaaaagctgtgaaaggcgcttatggcaccatgggccgcaattggctgccaggacctaaactcctggaccagagagttagggcctatacaggcggaacagataattatgcaaactggaacatctggagtaatggaaacaaggtcaatttgaaggacaggcagtacctcttgcaacccggacctgtatcagctactcacacaaaagtagaggcttccagcatcccagcccaaaatattttaggtttagctaaagatccatacagatctggcagcactacagcaggaataagtgatattatggtcacggacgagcaggaagtagcacctacaaatggcgtagggtggaaaccatatggcaagactgtaacgaatgaacaaaacactactacagctcctacgagttcagatcttgatgttcttggagctttaccaggaatggtctggcagaacagagatatatatctacagggacctatttgggctaaaataccaaagaccgatggcaaattccatccttctccgaatctcggaggatttggcctgtacaacccaccaccacaggtcttcatcaagaatacaccggtacctgcagaccctccggtagaatacgtacaccagaagtgtaattcttacataacccagtattcttcgggccagtgtacagtagagatggtgtgggagctcagaaaagagaattcaaagcggtggaatccagaaattcagttcaccagcaatttcagtgacagaacaagcataatgtttgcacctaatgaaactggtggatacatagaagatagattgattggaaccagatatctaactcaaaatctgtaa

SEQ ID NO: 260 - DNA, 1605 bp, Goose parvovirus
atggcagagggaggaggcggagctttgggcgacgcttcagggggtgccgatggagtgggtaatgcctcgggaaattggcattgcgattcccaatggatgggaaacacagtcatcacaaagaccaccagaacctgggtcctgccaagctacaacaaccacatctacaaagcgattaccagtggaacctctcaagatgcaaatgtccagtatgcaggatacagtaccccctgggggtactttgatttcaaccgcttccactgccacttctcccctagagactggcagagacttatcaacaaccattggggaatcagacccaagtctcttaaattcaagatcttcaatgtccaagtcaaagaagtcacaacgcaggatcagacgaagaccattgcaaacaatctcacgtcaacaattcaagtctttacggatgacgagcatcaactcccgtatgtcctgggctcggctacggaaggcaccatgccgccgttcccgtcggatgtctatgccctgccgcagtacgggtattgcacaatgcacaccaaccagaacggtgcacgattcaatgaccggagtgcattctactgcttagaatacttccccagtcagatgctaagaacaggcaacaactttgagttcacgtttgactttgaagaagttcctttccacagcatgttcgctcattcacaggacttagacaggctgatgaaccccttagtggatcaatacctctggaatttcaatgaggtagacagcagcagaaatgctcgatttaaaaaagctgtgaaaggcgcttatggcaccatgggccgcaattggctgccaggacctaaactcctggaccagagagttagggcctatacaggcggaacagataattatgcaaactggaacatctggagtaatggaaacaaggtcaatttgaaggacaggcagtacctcttgcaacccggacctgtatcagctactcacacaaaagtagaggcttccagcatcccagcccaaaatattttaggtttagctaaagatccatacagatctggcagcactacagcaggaataagtgatattatggtcacggacgagcaggaagtagcacctacraayggcgtagggtggaaaccatatggcaagactgtaacgaatgaacaaaacactactacagctcctacaagttcagatctggatgttcttggagctttaccaggaatggtttggcagaacagggatatatatctgcagggacctatttgggcaaaaataccgaagactgatggtaaattccatccttctccgaatctcggaggatttggtctgcacaatccaccaccgcaggtgttcatcaagaatacaccagtgcctgcagaccctccagtagaatacgtgcaccagaagtggaattcctacataacccagtactctacgggccagtgtacagtagagatggtgtgggagctgagaaaagagaattcaaagagatggaacccagaaatccagttcaccagtaatttcagtgacagaacaagcataatgtttgcacctaatgaaactggtggatatgtagaagatagattaattggaaccagatatctaactcaaaatctgtaa

SEQ ID NO: 261 - DNA, 1605 bp, Goose parvovirus
atggcagagggaggaggcggagctttgggcgacgcttcagggggtgccgatggagtgggtaatgcctcgggaaattggcattgcgattcccaatggatgggaaacacagtcatcacaaagaccaccagaacctgggtcctgccaagctacaacaaccacatctacaaagcgattaccagtggaacctctcaagatgcaaatgtccagtatgcaggatacagtaccccctgggggtactttgatttcaaccgcttccactgccacttctcccctagagactggcagagacttatcaacaaccattggggaatcagacccaagtctcttaaattcaagatcttcaatgtccaagtcaaagaagtcacaacgcaggatcagacaaagaccattgcaaacaatctcacgtcaacaattcaagtctttacggatgacgagcatcaactcccgtatgtcctggggtcggctacggaaggcaccatgccgccgttcccgtcggatgtctatgccctgccgcagtacgggtactgcaccatgcacaccaaccagaatggagcacggttcaatgaccgtagtgcattctactgcttagagtacttccctagtcagatgctaagaacaggcaacaactttgagttcacatttgactttgaagaagttcctttccatagcatgttcgctcattcacaggacttagacaggctgatgaaccccctagtggatcaatacctctggaatttcaatgaggtagacagcagcagaaatgctcaatttaaaaaggctgtgaaaggcgcttatggcaccatgggccgcaattggctgccaggacctaaattcctggaccagagagttagggcctatacaggcggaacagataattatgcaaactggaacatctggagtaatggaaacaaggttaatttgaaggacaggcagtacctcctgcaacctggacctgtatcagctactcacacagaagcagaggcttccagcatcccagcccaaaatattttaggtttagctaaagatccatacagatctggcagcactacagcaggaataagtgatgttatggtcacggacgagcaggaagtagcacctacaaacggcgtagggtggaaaccatatggcaagactgtaacgaatgaacaaaacactactacagctcctacgagttcagatcttgatgttcttggagctttaccaggaatggtttggcagaacagagatatatatctacagggacctatttgggctaaaataccaaagaccgatggcaaattccatccttctccgaatctcggaggatttggcctgcacaatccaccaccgcaggtgttcatcaagaatacaccagtgcctgcagaccctccagtagaatacgtgcaccagaagtggaattcctacataacccagtactctacgggccagtgtacagtagagatggtgtgggagctgagaaaagagaattcaaagagatggaacccagaaatccagttcaccagtaatttcagtgacagaacaagcataatgtttgcacctaatgaaactggtggatacatagaagatagattgattggaaccagatatctaactcaaaatctgtaa

SEQ ID NO: 262 - DNA, 1605 bp, Goose parvovirus
atggcagagggaggaggcggagctttgggcgacgcttcagggggtgccgatggagtgggtaatgcctcgggaaattggcattgcgattcccaatggatgggaaacacagtcatcacaaagaccaccagaacctgggtcctgcccagctacaacaaccacatctacaaagcgattaccagtggaacctctcaagatgcaaatgtccagtatgcaggatacagtaccccctgggggtactttgatttcaaccgcttccactgccacttctcccctagagactggcagagacttatcaacaaccattggggaatcagacccaagtctcttaaattcaagatcttcaatgtgcaagtcaaagaagtcacaacgcaggatcagacgaagaccattgcaaacaatctcacgtcaacaattcaagtctttacggatgacgagcatcaactcccgtatgtcctgggctcggctacggaaggcaccatgccgccgttcccgtcggatgtctatgccctgccgcagtacgggtattgcacaatgcacaccaaccagaacggtgcacgattcaatgaccggagtgcattctactgcttagaatacttccccagtcagatgctaagaacaggcaacaactttgagttcacgtttgactttgaagaagttcctttccacagcatgttcgctcattcacaggacttagacaggctgatgaaccccttagtggatcaatacctctggaatttcaatgaggtagacagcagcagaaatgctcaatttaaaaaggctgtgaaaggcgcttatggcaccatgggccgcaattggctgccaggacctaaattcctggaccagagagttagggcctatacaggcggaactgataattatgcaaactggaacatctggagtaatggaaacaaggttaatttgaaggacaggcagtacctcctgcaacccggacctgtatcagctactcacacagaagcagaggcttccagcatcccagcccaaaatattttaggtttagctaaagatccatacagatctggcagcactacagcaggaataagtgatattatggtcacggacgagcaggaagtagcacctacaaacggcgtagggtggaaaccatatggcaagactgtaacgaatgaacaaaacactactacagctcctacaagttcagatctggatgttcttggagctttaccaggaatggtttggcagaacagggatatatatctacagggacctatttgggcaaaaataccgaagactgatggtaaattccatccttctccgaatctcggaggatttggtctgcacaatccaccaccgcaggtgttcatcaagaatacaccagtgcctgcagaccctccagtagaatacgtgcaccagaagtggaattcctacataacccagtactctacgggccagtgtacagtagagatggtgtgggagctgagaaaagagaattcaaagagatggaacccagaaatccagttcaccagtaatttcagtgacagaacaagcataatgtttgcatctaatgaaactggtggatatgtagaagatagattatttggaaccagatatctaactcaaaatctgtaa

SEQ ID NO: 263 - DNA, 1605 bp, Goose parvovirus
atggcagagggaggaggcggagctttgggcgacgcttcagggggtgccgatggagtgggtaatgcctcgggaaattggcattgcgattcccaatggatgggaaacacagtcatcacaaagaccaccagaacctgggtcctgccaagctacaacaaccacatctacaaagcgattaccagtggaacctctcaagatgcaaatgtccagtatgcaggatacagtaccccctgggggtactttgatttcaaccgcttccactgccacttctcccctagagactggcagagacttatcaacaaccattggggaatcagacccaagtctcttaaattcaagatcttcaatgtccaagtcaaagaagtcacaacgcaggatcagacgaagaccattgcaaacagtctcacgtcaacaattcaagtctttacggacgacgagcatcaactcccgtatgtcctgggctcggctacggaaggcaccatgccgccgttcccgtcggatgtctatgccctgccgcagtacgggtattgcacaatgcacaccaaccagaacggtgcacgattcaatgaccggagtgcattctactgcttagaatacttccccagtcagatgctaagaacaggcaacaactttgagttcacgtttgactttgaagaagttcctttccacagcatgttcgctcattcacaggacttagacaggctgatgaaccccttagtggatcaatacctctggaatttcaatgaggtagacagcagcagaaatgctcaatttaaaaaggctgtgaaaggcgcttatggcaccatgggccgcaattggctgccaggacctaaattcctggaccagagagttagggcctatacaggcggaacagataattatgcaaactggaacatctggagtaatggaaacaaggttaatttgaaggacaggcagtacctcctgcaacccggacctgtatcagctactcacacagaagcagaggcttcctgcatcccagcccaaaatattttaggtttagctaaagatccatacagatctggcagcactacagcaggaataagtgatattatggtcacggacgagcaggaagtagcacctacaaacggcgtagggtggaaaccatatggcaagactgtaacgaatgaacaaaacactactacagctcctacaagttcagatctggatgttcttggagctttaccaggaatggtttggcagaacagggatatatatctgcagggacctatttgggcaaaaataccgaagactgatggtaaattccatccttctccgaatctcggaggatttggtctgcacaatccaccaccgcaggtgttcatcaagaatacaccagtgcctgcagaccctccagtagaatacgtgcaccagaagtggaattcctacataacccagtactctacgggccagtgtacagtagagatggtgtgggagctgagaaaagagaattcaaagagatggaacccagaaatccagttcaccagtaatttcagtgacagaacaagcataatgtttgcacctaatgaaactggtggatatgtagaagatagattaattggaaccagatatctaactcaaaatctgtaa

SEQ ID NO: 264 - DNA, 1605 bp, Goose parvovirus
atggcagagggaggaggcggagctttgggcgacgcttcagggggtgccgatggagtgggtaatgcctcgggaaattggcattgcgattcccaatggatgggaaacacagtcatcacaaagaccaccagaacctgggtcctgccaagctacaacaaccacatctacaaagcgattaccagtggaacctctcaagatgcaaatgtccagtatgcaggatacagtaccccctgggggtactttgatttcaaccgcttccactgccacttctcccctagagactggcagagacttatcaacaaccattggggaatcagacccaagtctcttaaattcaagatcttcaatgtccaagtcaaagaagtcacaacgcaggatcagacgaagaccattgcaaacaatctcacgtcaacaattcaagtctttacggatgacgagcatcaactcccgtatgtcctgggctcggctacgaaaggcaccatgccgccgttcccgtcggatgtctatgccctgccgcagtacgggtattgcacaatgcacaccaaccagaacggtgcacgattcaatgaccggagtgcattctactgcttagaatacttccccagtcagatgctaagaacaggcaacaactttgagttcacgtttgactttgaagaagttcctttccacagcatgttcgctcattcacaggacttagacaggctgatgaaccccttagtggatcaatacctctggaatttcaatgaggtagacagcagcagaaatgctcaatttaaaaaggctgtgaaaggcgcttatggcaccatgggccgcaattggctgccaggacctaaattcctggaccagagagttagggcctatacaggcggaacagataattatgcaaactggaacatctggagtaatggaaacaaggtcaatttgaaggacaggcagtacctcctgcaacccggacctgtatcagctactcacacagaagcagaggcttccagcatcccagcccaaaatattttaggtttagctaaagatccatacagatctggcagcactacagcaggaataagtgatattatggtcacggacgagcaggaagtagcacctacaaacggcgtagggtggaaaccatatggcaagactgtaacgaatgaacaaaacactactacagctcctacaagttcagatctggatgttcttggagctttaccaggaatggtttggcagaacagggatatatatctgcagggacctatttgggcaaaaataccgaagactgatggtaaattccatccttctccgaatctcggaggttttggtctgcacaatccaccaccgcaggtgttcatcaagaatacaccagtgcctgcagaccctccagtagaatacgtgcaccagaagtggaattcctacataacccagtactctacgggccagtgtacagtagagatggtgtgggggctgagaaaagagaattcaaggagatggaacccagaaatccagttcaccagtaatttcagtgacagaacaagcataatgtttgcacctaatgaaactggtggatatgtagaagatagattaattggaaccagatatctaactcaaaatctgtaa

SEQ ID NO: 265 - DNA, 1605 bp, Goose parvovirus
atggcagagggaggaggcggagctttgggcgacgcttcagggggtgccgatggagtgggtaatgcctcgggaaattggcattgcgattcccaatggatgggaaacacagtcatcacaaagaccaccagaacctgggtcctgccaagctacaacaaccacatctacaaagcgattaccagtggaacctctcaagatgcaaatgtccagtatgcaggatacagtaccccctgggggtactttgatttcaaccgcttccactgccacttctcccctagagactggcagagacttatcaacaaccattggggaatcagacccaagtctcttaaattcaagatcttcaatgtccaagtcaaagaagtcacaacgcaggatcagacgaagaccattgcaaacaatctcacgtcaacaattcaagtctttacggatgacgagcatcaactcccgtatgtcctgggctcggctacggaaggcaccatgccgccgttcccgtcggatgtctatgccctgccgcagtacgggtactgcaccatgcacaccaaccagaatggagcacggttcaatgaccgtagtgcattctactgcttagagtacttccctagtcagatgctaagaacaggcaacaactttgagttcacatttgactttgaagaagttcctttccatagcatgttcgctcattcacaggacttagacaggctgatgaaccccctagtggatcaatacctctggaatttcaatgaggtagacagcagcagaaatgctcaatttaaaaaggctgtgaaaggggcttatggcaccatgggccgcaattggctgccaggacctaaattcctggaccagagagttagggcctatacaggcggaacagataattatgcaaactggaacatctggagtaatggaaacaaggttaatttgaaggacaggcagtacctcctgcaacctggacctgtatcagctactcacacagaagcagaggcttccagcatcccagcccaaaatattttaggtttagctaaagatccatacagatctggcagcactacagcaggaataagtgatgttatggtcacggacgagcagggagtagcacctacaaacggcgtagggtggaaaccatatggcaagactgtaacgaatgaacaaaacactactacagctcctacgagttcagatcttgatgttcttggagctttaccaggaatggtttggcagaacagagatatatatctacagggacctatttgggctaaaataccaaagaccgatggcaaattccatccttctccgaatctcggaggatttggcctgcacaatccaccaccgcaggtgttcatcaagaatacaccagtgcctgcagaccctccagtagaatacgtgcaccagaagtggaattcctacataacccagtactctacgggccagtgtacagtagagatggtgtgggagctgagaaaagagaattcaaagagatggaacccagaaatccagttcaccagtaatttcagtgacagaacaagcataatgtttgcacctaatgaaactggtggatacatagaagatagattgattggaaccagatatctaactcaaaatctgtaa

SEQ ID NO: 266 - DNA, 1605 bp, Goose parvovirus
atggcagagggaggaggcggagctttgggcgacgcttcagggggtgccgatggagtgggtaatgcctcgggaaattggcattgcgattcccaatggatgggaaacacagtcatcacaaagaccaccagaacctgggtcctgcccagctacaacaaccacatctacaaagcgattaccagtggaacctctcaagatgcaaatgtccagtatgcaggatacagtaccccctgggggtactttgatttcaaccgcttccactgccacttctcccctagagactggcagagacttatcaacaaccattggggaatcagacccaagtctcttaaattcaagatcttcaatgtgcaagtcaaagaagtcacaacgcaggatcagacgaagaccattgcaaacaatctcacgtcaacaattcaagtctttacggatgacgagcatcaactcccgtatgtcctgggctcggctacggaaggcaccatgccgccgttcccgtcggatgtctatgccctgccgcagtacgggtattgcacaatgcacaccaaccagaatggacacgattcaaatgaccggagtgcattctactgcttagaatacttccccagtcagatgctaagaacaggcaacaactttgagttcacgtttgactttgaagaagttcctttccacagcatgttcgctcattcacaggacttagacaggctgatgaaccccttagtggatcaatacctctggaatttcaatgaggtagacagcagcagaaatgctcaatttaaaaaggctgtgaaaggcgcttatggcaccatgggccgcaattggctgccaggacctaaattcctggaccagagagttagggcctatacaggcggaactgataattatgcaaactggaacatctggagtaatggaaacaaggttaatttgaaggacaggcagtacctcctgcaacccggacctgtatcagctactcacacagaagcagaggcttccagccttccagctcaaaatattttaggtttagctaaagatccatacagatctggcagcactacagcaggaataagtgatattatggtcacggacgagcaggaagtagcacctacaaacggcgtagggtggaaaccatatggcaagactgtaacgaatgaacaaaacactactacagctcctacaagttcagatctggatgttcttggagctttaccaggaatggtttggcagaacagggatatatatctacagggacctatttgggcaaaaataccgaagactgatggtaaattccatccttctccgaatctcggaggatttggtctgcacaatccaccaccgcaggtgttcatcaagaatacaccagtgcctgcagaccctccagtagaatacgtgcaccagaagtggaattcctacataacccagtactctacgggccagtgtacagtagagatggtgtgggagctgagaaaagagaattcaaagagatggaacccagaaatccagttcaccagtaatttcagtgacagaacaagcataatgtttgcacctaatgaaactggtggatatgtagaagatagattaattggaaccagatatctaactcaaaatctgtaa

SEQ ID NO: 267 - DNA, 2199 bp, Goose parvovirus
atgtctacttttttagagaaatttgaagactggtatgagactgcagccgcatcttggcggcatttgaaagctggagcccccaagccaaaatcaaaccagcaatctcagtctgtgtctacagacagaaaaccccaacgaaaagacaataataggggctttgtacttcctggctataagtatcttgggcctggtaacggccttgataaaggcccacctgtcaataaagcggacaacatcgcgcttgagcacgataaagcgtacgaccagcagctcaaggcaggagacaacccctatatcaaatttaatcacgcagatcaagaatttatagataatctgcaaggtgatacctcctttggaggcaacctcggaaaagccgtattccaagctaaaaaaagaattctagagcctttaggcctagtagaagaacctgtaaacacggctcctgctaaaaagagtagtggaaagctaacagatcactaccctatagtaaaaaagcctaaattatctgaagaaaactctccttcacccagtaatagtggaggagaagcaagtgcagctgccaccgaaggctccgaacctgtggcagcacctaacatggcagagggaggaagcggagctatgggcgactctgcagggggtgccgatggagtgggtaatgcctcaggaaattggcattgcgattcccaatggctgggagacacagtcattaccaagactacaagaacctgggtcctgccaagctacaacaaccacatctacaaagccatcacaagcggaacaaacccagactcaaatacccaatatgctggatacagcaccccctgggggtactttgatttcaacagattccactgccatttctctccaagagactggcagagactcatcaacaaccattgggggattagaccgaaagcactcaaattcaagatattcaatgtgcaagttaaagaagtcacgacgcaagaccagacaaaaactattgctaacaaccttacctctacaatccagatattcacggataatgaacaccagctgccctatgttctgggctcggccacggaggggacgatgccaccgttcccctcagatgtgtatgccttgccccagtacggctactgcacaatgcacaccaaccagagtggagctagattcaatgacagaagtgccttctattgcttagagtacttccccagtcagatgctgagaacagggaataattttgaattcagttttgagtttgaagaagttcccttccatagcatgttcgctcattcacaggatttagacaggctaatgaatcctctcctagatcagtacctgtggaatttctctgaggttaatggtggcaggaatgcacagttcaaaaaagctgtgaaaggagcatttggtgcaatggggagaaattggcttccaggacccaaacttctagaccaaagggtaagagcatacagtggaggaacagataactatgcgaactggtcaatctggagtaaaggaaacaaagtttttcttaaagacagagagtatctactgcaaccaggtccagtagctactacacatacaaaagatcaggcttccagtataccggctcaaaacacaataggaattgcaaaagacccctacaggtcaggcagtagtctggcaggaatttcagacattatggtaacagaagagcaagaaatagcaccaactaatggtgtagggtggagaccttatggattgaccgtaaccaatgaacaaaacacaacaacagctcctacaaatgctgacctagaagtactgggagcgctacctggcatggtctggcagaacagagatatttacctgcagggtcctatatgggctaaaatacccaaaacagatgggaaatttcatccttctccaaacctgggaggttttggtctccataatccacctccccaggtctttataaaaaatactcctgttcctgcagatcctccagtagagtatgtaaatcagaagtggaattcttacattacacagtattcaacagggcagtgtactgtagaaatggtctgggaactcagaaaagaaaactccaagagatggaaccctgagatccagtttaccagtaactttggaaatagaacaagtactatgtttgctccgaatgagactggaggctatgtagaagataggctgattggtaccaggtatttgactcagaatctgtaa

SEQ ID NO: 268 - DNA, 2211 bp, Muscovy duck parvovirus
atggctgccgatggttatcttccagattggctcgaggacaacctctctgagggcattcgcgagtggtgggacttgaaacctggagccccgaaacccaaagccaaccagcaaaagcaggacgacggccggggtctggtgcttcctggctacaagtacctcggacccttcaacggactcgacaagggggagcccgtcaacgcggcggacgcagcggccctcgagcacgacaaagcctacgaccagcagctcaaagcgggtgacaatccgtacctgcggtataatcacgccgacgccgagtttcaggagcgtctgcaagaagatacgtcttttgggggcaacctcgggcgagcagtcttccaggccaagaagcgggttctcgaacctctcggtctggttgaggaaggcgctaagacggctcctggaaagaagagaccggtagagcagtcgccacaagagccagactcctcctcgggcatcggcaagacaggccagcagcccgctaaaaagagactcaattttggtcagactggcgactcagagtcagtccccgacccacaacctctcggagaacctccagcagccccctcaggtctgggacctaatacaatggcttcaggcggtggcgctccaatggcagacaataacgaaggcgccgacggagtgggtaattcctcgggaaattggcattgcgattccacatggctgggggacagagtcatcaccaccagcacccgaacctgggccctgcccacctacaacaaccacctctacaagcaaatctccaacggcacctcgggaggaagcaccaacgacaacacctattttggctacagcaccccctgggggtattttgacttcaacagattccactgtcacttttcaccacgtgactggcaacgactcatcaacaacaattggggattccggcccaaaagactcaacttcaagctgttcaacatccaggtcaaggaagtcacgacgaacgaaggcaccaagaccatcgccaataatctcaccagcaccgtgcaggtctttacggactcggagtaccagttaccgtacgtgctaggatccgctcaccagggatgtctgcctccgttcccggcggacgtcttcatggttcctcagtacggctatttaactttaaacaatggaagccaagccctgggacgttcctccttctactgtctggagtatttcccatcgcagatgctgagaaccggcaacaactttcagttcagctacaccttcgaggacgtgcctttccacagcagctacgcgcacagccagagcctggacaggctgatgaatcccctcatcgaccagtacctgtactacctggtcagaacgcaaacgactggaactggagggacgcagactctggcattcagccaagcgggtcctagctcaatggccaaccaggctagaaattgggtgcccggaccttgctaccggcagcagcgcgtctccacgacaaccaaccagaacaacaacagcaactttgcctggacgggagctgccaagtttaagctgaacggccgagactctctaatgaatccgggcgtggcaatggcttcccacaaggatgacgacgaccgcttcttcccttcgagcggggtcctgatttttggcaagcaaggagccgggaacgatggagtggattacagccaagtgctgattacagatgaggaagaaatcaaggctaccaaccccgtggccacagaagaatatggagcagtggccatcaacaaccaggccgccaatacgcaggcgcagaccggactcgtgcacaaccagggggtgattcccggcatggtgtggcagaatagagacgtgtacctgcagggtcccatctgggccaaaattcctcacacggacggcaactttcacccgtctcccctgatgggcggctttggactgaagcacccgcctcctcaaattctcatcaagaacacaccggttccagcggacccgccgcttaccttcaaccaggccaagctgaactctttcatcacgcagtacagcaccggacaggtcagcgtggaaatcgagtgggagctgcagaaagaaaacagcaaacgctggaatccagagattcaatacacttccaactactacaaatctacaaatgtggactttgctgtcaacacggagggggtttatagcgagcctcgccccattggcacccgttacctcacccgcaacctgtaa

SEQ ID NO: 269 - DNA, 2190 bp, Non-human primate Adeno-associated virus
atggctgccgatggttatcttccagattggctcgaggacaacctctctgagggcattcgcgagtggtgggacctgaaacctggagccccgaaacccaaagccaaccagcaaaagcaggacgacggccggggtctggtgcttcctggctacaagtacctcggacccttcaacggactcgacaagggggagcccgtcaacgcggcggacgcagcggccctcgagcacgacaaggcctacgaccagcagctcaaagcgggtgacaatccgtacctgcggtataaccacgccgacgccgagtttcaggagcgcctgcaagaagatacgtcatttgggggcaacctcgggcgagcagtcttccaggccaagaagcgggttctcgaacctctcggtctggttgaggaaggcgctaagacggctcctggaaagaagagacccatagactctccagactcctccacgggcatcggcaaaaaaggccagcagcccgctaaaaagaagctcaattttggtcagactggcgactcagagtcagtccccgaccctcaacctcttggagaacctccagcagcgccctctagtgtgggatctggtacaatggctgcaggcggtggcgcaccaacggcagacaataacgaaggtgccgacggagtgggtaatgcctcaggaaattggcattgcgattccacatggctgggcgacagagtcatcaccaccagcaccagaacctgggccctccccacctacaacaaccacctctacaagcaaatctccagcagcagctcaggagccaccaatgacaaccactacttcggctacagcaccccctgggggtattttgactttaacagattccactgccacttctcaccacgtgactggcagcgactcatcaacaacaactggggattccggcccaagaagctgcggttcaagctcttcaacatccaggtcaaggaggtcacaacgaatgacggcgtcacgaccatcgctaataaccttaccagcacggttcaggtcttctcggactcggaataccagctgccgtacgtcctcggctctgcgcaccagggctgcctgcctccgttcccggcggacgtcttcatgattcctcagtacggctacctgactctgaacaacggcagccaatcggtgggccgttcctccttctactgcctggaatatttcccctctcaaatgctgagaacgggcaacaactttgagttcagttacagcttcgaggacgtgcctttccacagcagctacgcgcacagccagagcctagaccggctgatgaaccctctcatcgaccagtacctgtactacctggcccggacccagagcaccacgggttccaccagggaactgcaatttcatcaagctgggcccaatactatggccgagcagtcaaagaactggctgcctggaccctgctataggcaacagagactgtcaaagaacttggactttaacaacaacagcaattttgcctggactgctgccactaaatatcatctgaatggcagaaactctttgaccaatcctggcattcccatggcaaccaacaaggatgatgaggaccagttctttcccatcaacggggtactggtttttggcaagacgggagctgccaacaaaactacgctggaaaacgttctgatgaccagcgaggaggagatcaagaccactaaccctgtggctacagaagaatacggtgtggtctccagcaacctgcagtcgtctacagccgggcctcaatcacagactatcaacagccagggagcactgcctggcatggtctggcagaaccgggacgtgtatctgcagggtcccatctgggccaaaattcctcacacggatggcaactttcacccgtctcctctgatgggcggttttggactcgaacacccgcctccacagatcctgatcaaaaacacacctgtacctgctaatcctccggaggtgtttactcctgccaagtttgcctccttcatcacgcagtacagcaccggacaagtcagcgtggaaatcgagtgggagctgcagaaagaaaacagcaagcgctggaacccagaaattcagtatacttccaattatgccaagtctaataatgttgaatttgctgtgaaccctgatggtgtttatactgagcctcgccccattggcactcgttacctcacccgtaatctgtaa

SEQ ID NO: 270 - DNA, 2190 bp, Non-human primate Adeno-associated virus
atggctgccgatggttatcttccagattggctcgaggacaacctctctgagggcattcgcgagtggtgggacctgaaacctggagccccgaaacccaaagccaaccagcaaaagcaggacgacggccggggtctggtgcttcctggctacaagtacctcggacccttcaacggactcgacaagggggagcccgtcaacgcggcggacgcagcggccctcgagcacgacaaggcctacgaccagcagctcaaagcgggtgacaatccgtacctgcggtataaccacgccgacgccgagtttcaggagcgtctgcaagaagatacgtcatttgggggcaacctcgggcgagcagtcttccaggccaagaagcgggttctcgaacctctcggtctggttgaggaaggcgctaagacggctcctggaaagaagagacccataggctctccagactcctccacgggcatcggcaaaaaaggccagcagcccgctaaaaagaagctcaattttggtcagactggcgactcagagtcagtccccgaccctcaacctcttggagaacctccagcagcgccctctagtgtgggatctggtacaatggctgcaggcggtggcgcaccaatggcagacaataacgaaggtgccgacggagtgggtaatgcctcaggaaattggcattgcgattccacatggctgggcgacagagtcatcaccaccagcaccagaacctgggccctccccacctacaacaaccacctctacaagcaaatctccagcagcagctcaggagccaccaatgacaaccactacttcggctacagcaccccctgggggtattttgactttaacagattccactgccacttctcaccacgtgactggcagcgactcatcaacaacaactggggattccggcccaagaagctgcggttcaagctcctcaacatccaggtcaaggaggtcacaacgaatgacggcgtcacgaccatcgctaataaccttaccagcacggttcaggtcttctcggactcggaataccagctgccgtacgtcctcggctctgcgcaccagggctgcctgcctccgttcccggcggacgtcttcatgattcctcagtacggctacctgactctggacaacggcagccaatcggtgggccgttcctccttctactgcctggaatatttcccctctcaaatgctgagaacgggcaacaactttgagttcagttacagcttcgaggacgtgcctttccacagcagctacgcgcacagccagagcctagaccggctgatgaaccctctcatcgaccagtacctgtactacctggcccggacccagagcaccacgggttccaccagggaactgcaatttcatcaagctgggcccaatactatggccgagcagtcaaagaactggctgcctggaccctgctataggcaacagagactgtcaaagaacttggactttaacaacaacagcaattttgcctggactgctgccactaaatatcatctgaatggcagaaactctttgaccaatcctggcattcccatggcaaccaacaaggatgatgaggaccagttctttcccatcaacggggtactggtttttggcaagacgggagctgccaacaaaactacgctggaaaacgttctgatgaccagcgaggaggagatcaagaccactaaccctgtggctacagaagaatacggtgtggtctccagcaacctgcagtcgtctacagccgggcctcaatcacagactatcaacagccagggagcactgcctggcatggtctggcagaaccgggacgtgtatctgcagggtcccatctgggccaaaattcctcacacggatggcaactttcacccgtctcctctgatgggcggttttggactcaaacacccgcctccacagatcctgatcaaaaacacacctgtacctgctaatcctccggaggtgtttactcctgccaagtttgcctccttcatcacgcagtacagcaccggacaagtcagcgtggaaatcgagtgggagctgcagaaagaaaacagcaagcgctggaacccagaaattcagtatacttccaattatgccaagtctaataatgttgaatttgctgtgaaccctgatggtgtttatactgagcctcgccccattggcactcgttacctcacccgtaatctgtaa

SEQ ID NO: 271 - DNA, 2190 bp, Non-human primate Adeno-associated virus
atggctgccgatggttatcttccagattggctcgaggacaacctctctgagggcattcgcgagtggtgggacctgaaacctggagccccgaaacccaaagccaaccagcaaaagcaggacgacggccggggtctggtgcttcctggctacaagtacctcggacccttcaacggactcgacaagggggagcccgtcaacgcggcggacgcagcggccctcgagcacgacaaggcctacgaccagcagctcaaagcgggtgacaatccgtacctgcggtataaccacgccgacgccgagtttcaggagcgtctgcaagaagatacgtcatttgggggcaacctcgggcgagcagtcttccaggccaagaagcgggttctcgaacctctcggtctggttgaggaaggcgctaagacggctcctggaaagaagagacccatagactctccagactcctccacgggcatcggcaaaaaaggccagcagcccgctaaaaagaagctcaattttggtcagactggcgactcagagtcagtccccgaccctcaacctcttggagaacctccagcagcgccctctagtgtgggatctggtacaatggctgcaggcggtggcgcaccaatggcagacaataacgaaggtgccgacggagtgggtaatgcctcaggaaattggcattgcgattccacatggctgggcgacagagtcatcaccaccagcaccagaacctgggccctccccacctacaacaaccacctctacaagcaaatctccagcagcagctcaggagccaccaatgacaaccactacttcggctacagcaccccctgggggtattttgactttaacagattccactgccacttctcaccacgtgactggcagcgactcatcaacaacaactggggattccggcccaagaagctgcggttcaagctcttcaacatccaggtcaaggaggtcacaacgaatgacggcgtcacgaccatcgctaataaccttaccagcacggttcaggtcttctcggactcggaataccagctgccgtacgtcctcggctctgcgcaccagggctgcctgcctccgttcccggcggacgtcttcatgattcctcagtacggctacctgactctgaacaacggcagccaatcggtgggccgttcctccttctactgcctggaatatttcccctctcaaatgctgagaacgggcaacaactttgagttcagttacagcttcgaggacgtgcctttccacagcagctacgcgcacagccagagcctagaccggctgatgaaccctctcatcgaccagtacctgtactacctggcccggacccagagcaccacgggttccaccagggaactgcaatttcatcaagctgggcccaatactatggccgagcagtcaaagaactggctgcctggaccctgctataggcaacagggactgtcaaagaacttggactttaacaacaacagcaattttgcctggactgctgccactaaatatcatctgaatggcagaaactctttgaccaatcctggcattcccatggcaaccaacaaggatgatgaggaccagttctttcccatcaacggggtactggtttttggcaagacgggagctgccaacaaaactacgctggaaaacgttctgatgaccagcgaggaggagatcaagaccactaaccctgtggctacagaagaatacggtgtggtctccagcaacctgcagccgtctacagccgggcctcaatcacagactatcaacagccagggagcactgcctggcatggtctggcagaaccgggacgtgtatctgcagggtcccatctgggccaaaattcctcacacggatggcaactttcacccgtctcctctgatgggcggttttggactcaaacacccgcctccacagatcctgatcaaaaacacacctgtacctgctaatcctccggaggtgtttactcctgccaagtttgcctccttcatcacgcagtacagcaccggacaagtcagcgtggaaatcgagtgggagctgcagaaagaaaacagcaagcgctggaacccagaaattcagtatacttccaattatgccaagtctaataatgttgaatttgctgtgaaccctgatggtgtttatactgagcctcgccccattggcactcgttacctcccccgtaatctgtaa

SEQ ID NO: 272 - DNA, 2202 bp, Non-human primate Adeno-associated virus
atggctgctgacggttatcttccagattggctcgaggacaacctctctgagggcattcgcgagtggtgggacctgaaacctggagcccccaagcccaaggccaaccagcagaagcaggacgacggccggggtctggtgcttcctggctacgagtacctcggacccttcaacggactcgacaagggggagcccgtcaacgcggcggacgcagcggccctcgagcacgacaaggcctacgaccagcagctcaaagcgggtgacaatccgtacctgcggtataaccacgccgacgccgagtttcaggagcgtctgcaagaagatacgtcttttgggggcaacctcgggcgagcagtcttccaggccaagaagagggtactcgaacctctgggcctggttgaagaaggtgctaagacggctcctggaaagaagagaccgttagagtcaccacaagagcccgactcctcctcaggaatcggcaaaaaaggcaaacaaccagccaaaaagagactcaactttgaagaggacactggagccggagacggaccccctgaaggatcagataccagcgccatgtcttcagacattgaaatgcgtgcagcaccgggcggaaatgctgtcgatgcgggacaaggttccgatggagtgggtaatgcctcgggtgattggcattgcgattccacctggtctgagggcaaggtcacaacaacctcgaccagaacctgggtcttgcccacctacaacaaccacttgtacctgcggctcggaacaacatcaaacagcaacacctacaacggattctccaccccctggggatactttgactttaacagattccactgtcacttctcaccacgtgactggcaaagactcatcaacaacaactggggactacgaccaaaagccatgcgcgttaaaatcttcaatatccaagttaaggaggtcacaacgtcgaacggcgagactacggtcgctaataaccttaccagcacggttcagatatttgcggactcgtcgtatgagctcccgtacgtgatggacgctggacaagagggaagtctgcctcctttccccaatgacgtcttcatggtgcctcaatatggctactgtggcattgtgactggcgaaaatcagaaccagacggacagaaatgctttctactgcctggagtattttccttcacaaatgctgagaactggcaataactttgaaacggcttacaactttgagaaggtgccgttccactcaatgtatgctcacagccagagcctggacggactgatgaatcccctcctggaccagtacctgtggcacttacagtcgaccacctctggagagactctgaatcaaggcaatgcagcaaccacatttggaaaaatcaggagtggagactttgccttttacagaaagaactggctgcctgggccttgtgttaaacagcagagattctcaaaaactgccagtcaaaattacaagattcctgccagcgggggcaacgctctgttaaagtatgacacccactataccttaaacaaccgctggagcaacatagcgcctggacctccaatggcaacagctggaccttcagatggggacttcagcaacgcccagctcatcttccctggaccatcagtcaccggaaacacaacaacctcagcaaacaatctgttgtttacatcagaagaagaaattgctgccaccaacccaagagacacggacatgtttggtcagattgctgacaataatcagaatgctacaactgctcccataaccggcaacgtgactgctatgggagtgcttcctggcatggtgtggcaaaacagagacatttactaccaagggccaatttgggccaagatcccacacgcggacggacattttcatccttcaccgctaattggcggttttggactgaaacatccgcctccccagatatttatcaaaaacacccccgtacctgcctatcctgcgacaaccttcactgcagccagagtggactctttcatcacacaatacagcaccggccaggtcgctgttcagattgaatgggaaatcgaaaaggaacgctccaaacgctggaatcctgaagtgcagtttacttcaaactgtgggaaccagtcttctatgttgtgggctcccgatacaactgggaagtatacagagccgcgggttattggctctcgttatttgactaatcatttgtaa

SEQ ID NO: 273 - DNA, 2202 bp, Non-human primate Adeno-associated virus
atggctgctgacggttatcttccagattggctcgaggacaacctctctgagggcattcgcgagtggtgggacctgaaacctggagcccccaagctcaaggccaaccagcagaagcaggacgacggccggggtctggtgcttcctggctacaagtacctcggacccttccacggactcgacaagggggagcccgtcaacgcggcggacgcagcggccctcgagcacgacaaggcctacgaccagcagctcaaagcgggtgacaatccgtacctgcggtataaccacgccgacgccgagtttcaggagcgtctgcaagaagatacgtcttttgggggcaacctcgggcgagcagtcttccaggccaagaagagggtactcgaaccactgggcctggttgaagaaggtgctaagacggctcctggaaagaagagaccgttagagtcaccacaagagcccgactcctcctcaggaatcggcaaaaaaggcaaacaaccagccaaaaagagactcaactttgaagaggacactggagccggagacggaccccctgaaggatcagataccagcgccatgtcttcagacattgaaatgcgtgcagcaccgggcggaaatgctgtcgatgcgggacaaggttccgatggagtgggtaatgcctcgggtgattggcattgcgattccacctggtctgagggcaaggtcacaacaacctcgaccagaacctgggtcttgcccacctacaacaaccacttgtacctgcggctcggaacaacatcaaacagcaacacctacaacggattctccaccccctggggatactttgactttaacagattccactgtcacttctcaccacgtgactggcaaagactcatcaacaacaactggggactacgaccaaaagccatgcgcgttaaaatcttcaatatccaagttaaggaggtcacaacgtcgaacggcgagactacggtcgctaataaccttaccagcacggttcagatatttgcggactcgtcgtatgagctcccgtacgtgatggacgctggacaagagggaagtctgcctcctttccccaatgacgtcttcatggtgcctcaatatggctactgtggcattgtgactggcgaaaatcagaaccagacggacagaaatgctttctactgcctggagtattttccttcacaaatgctgagaactggcaataactttgaaatggcttacaactttgagaaggtgccgttccactcaatgtatgctcacagccagagcctggacagactgatgaatcccctcctggaccagtacctgtggcacttacagtcgaccacctctggagagactctgaatcaaggcaatgcagcaaccacatttggaaaaatcaggagtggagactttgccttttacagaaagaactggctgcctgggccttgtgttaaacagcagagattctcaaaaactgccagtcaaaattacaagattcctgccagcgggggcaacgctctgttaaagtatgacacccactataccttaaacaaccgctggagcaacatagcgcctggacctccaatggcaacagctggaccttcagatggggacttcagcaacgcccagctcatcttccctggaccatcagtcaccggaaacacaacaacctcagcaaacaatctgttgtttacatcagaaggagaaattgctgccaccaacccaagagacacggacatgtttggtcagattgctgacaataatcagaatgctacaactgctcccataaccggcaacgtgactgctatgggagtgcttcctggcatggtgtggcaaaacagagacatttactaccaagggccaatttgggccaagatcccacacgcggacggacattttcatccttcaccgctaattggcggttttggactgaaacatccgcctccccagatatttatcaaaaacacccccgtacctgccaatcctgcgacaaccttcactgcagccagagtggactctttcatcacacaatacagcaccggccaggtcgctgttcagattgaatgggaaatcgaaaaggaacgctccaaacgccggaatcctgaagtgcagtttacttcaaactatgggaaccagtcttctatgttgtgggctcccgatacaactgggaagtatacagagccgcgggttattggctctcgttatttgactaatcatttgtaa

SEQ ID NO: 274 - DNA, 2202 bp, Non-human primate Adeno-associated virus
atggctgctgacggttatcttccagattggctcgaggacaacctctctgagggcattcgcgagtggtgggacctgaaacctggagcccccaagcccaaggccaaccagcagaagcaggacgacggccggggtctggtgcttcctggctacaagtacctcggacccttcaacggactcgacaagggggagcccgtcaacgcggcggacgcagcggccctcgagcacgacaaggcctacgaccagcagctcaaagcgggtgacaatccgtacctgcggtataaccacgccgacgccgagtttcaggagcgtctgcaagaagatacgtcttttgggggcaacctcgggcgagcagtcttccaggccaagaagagggtactcgaacctctgggcctggttgaagaaggtgctaagacggctcctggaaagaagagaccgttagagtcaccacaagagcccgactcctcctcaggaatcggcaaaaaaggcaaacaaccagccaaaaagagactcaactttgaagaggacactggagccggagacggaccccctgaaggatcagataccagcgccatgtcttcagacattgaaatgcgtgcagcaccgggcggaaatgctgtcgatgcgggacaaggttccgatggagtgggtaatgcctcgggtgattggcattgcgattccacctggtctgagggcaaggtcacaacaacctcgaccagaacctgggtcttgcccacctacaacaaccacttgtacctgcggctcggaacaacatcaaacagcaacacctacaacggattctccaccccctggggatactttgactttaacagattccactgtcacttctcaccacgtgactggcaaagactcatcaacaacaactggggactacgaccaaaagccatgcgcgttaaaatcttcaatatccaagttaaggaggtcacaacgtcgaacggcgagactacggtcgctaataaccttaccagcacggttcagatatttgcggactcgtcgtatgagctcccgtacgtgatggacgctggacaagagggaagtctgtctcctttccccaatgacgtcttcatggtgcctcaatatggctactgtggcattgtgactggcgaaaatcagaaccagacggacagaaatgctttctactgcctggagtattttccttcacaaatgctgagaactggcaataactttgaaatggcttacaactttgggaaggtgccgttccactcaatgtatgcttacagccagagcccggacagactgatgaatcccctcctggaccagtacctgtggcacttacagtcgaccacctctggagagactctgaatcaaggcaatgcagcaaccacatttggaaaaatcaggagtggagactttgccttttacagaaagaactggctgcctgggccttgtgttaaacagcagagactctcaaaaactgccagtcaaaattacaagattcctgccagcgggggcaacgctctgttaaagtatgacacccactataccttaaacaaccgctggagcaacatagcgcctggacctccaatggcaacagctggaccttcagatggggacttcagcaacgcccagctcatcttccctggaccatcagtcaccggaaacacaacaacctcagcaaacaatctgttgtttacatcagaagaagaaattgctgccaccaacccaagagacacggacatgtttggtcagattgctgacaataatcagaatgctacaactgctcccataaccggcaacgtgactgctatgggagtgcttcctggcatggtgtggcaaaacagagacatttactaccaagggccaatttgggccaagatcccacacgcggacggacattttcatccttcaccgctaattggcggttttggactgaaacatccgcctccccagatatttatcaaaaacacccccgtacctgccaatcctgcgacaaccttcactgcagccagagtggactctttcatcacacaatacagcaccggccaggtcgctgttcagattgaatgggaaatcgaaaaggaacgctccaaacgctggaatcctgaagtgcagtttacttcaaactatgggaaccagtcttctatgttgtgggctcccgatacaactgggaagtatacagagccgcgggttattggctctcgttatttgactaatcatttgtaa

SEQ ID NO: 275 - DNA, 2202 bp, Non-human primate Adeno-associated virus
atggctgccgatggttatcttccagattggctcgaggacaacctctctgagggcattcgcgagtggtgggacttgaaacctggagccccgaaacccaaagccaaccagcaaaagcaggacgacggccggggtctggtgcttcctggctacaagtacctcggacccttcaacggactcgacaagggggagcccgtcaacgcggcggacgcagcggccctcgagcacgacaaggcctacgaccagcagctcaaagcgggtgacaatccgtacctgcggtataaccacgccgacgccgagtttcaggagcgtcttcaagaagatacgtcttttgggggcaacctcgggcgagcagtcttccaggccaagaagcgggttctcgaacctctcggtctggttgaggaaggcgctaagacggctcctggaaagaagagacccatagaatcccccgactcctccacgggcatcggcaagaaaggccagcagcccgctaaaaagaagctcaactttgggcagactggcgactcagagtcagtgcccgaccctcaaccaatcggagaaccccccgcaggcccctctggtctgggatctggtacaatggctgcaggcggtggcgctccaatggcagacaataacgaaggcgccgacggagtgggtagttcctcaggaaattggcattgcgattccacatggctgggcgacagagtcatcaccaccagcacccgaacctgggccctccccacctacaacaaccacctctacaagcaaatctccaacgggacatcgggaggaagcaccaacgacaacacctacttcggctacagcaccccctgggggtattttgactttaacagattccactgccacttctcaccacgtgactggcagcgactcatcaacaacaactggggattccggcccaagagactcaacttcaagctcttcaacatccaggtcaaggaggtcacgcagaatgaaggcaccaagaccatcgccaataaccttaccagcacgattcaggtctttacggactcggaataccagctcccgtacgtcctcggctctgcgcaccagggctgcctgcctccgttcccggcggacgtcttcatgattcctcagtacgggtacctgactctgaacaacggcagtcaggccgtgggccgttcctccttctactgcctggagtactttccttctcaaatgctgagaacgggcaacaactttgagttcagctaccagtttgaggacgtgccttttcacagcagctatgcgcacagccaaagcctggaccggctgatgaaccccctcatcgaccagtacctgtactacctgtctcggactcagtccacgggaggtaccgcaggaactcagcagttgctattttctcaggccgggcctaataacatgtcggctcaggccaaaaactggctacccgggccctgctaccggcagcaacgcgtctccacgacagtgtcgcaaaataacaacagcaactttgcttggaccggtgccaccaagtatcatctgaatggcagagactctctggtaaatcccggtgtcgctatggcaacgcacaagggcgacgaagagcgattttttccatccagcggagtcttgatgtttgggaaacagggagctggaaaagacaacgtggactatagcagcgttatgctaaccagtgaggaagaaatcaaaaccaccaacccagtggccacagaacagtacggcgtggtggccgataacctgcaacagcaaaacgccgctcctattgtaggggccgtcaacagtcaaggagccttacctggcatggtctggcagaaccgggacgtgtacctgcagggtcctatctgggccaagattcctcacacggacggcaactttcatccttcgccgctgatgggaggctttggactgaaacacccgcctcctcagatcctgattaagaatacacctgttcccgcggatcctccaactaccttcagtcaagccaagctggcgtcgttcatcacgcagtacagcaccggacaggtcagcgtggaaattgaatgggagctgcagaaagagaacagcaagcgctggaacccagagattcagtatacttccaactactacaaatctacaaatgtggactttgctgtcaatactgagggtacttattcagagcctcgccccattggcacccgttacctcacccgtagcctgtaa

SEQ ID NO: 276 - DNA, 2058 bp, Non-human primate Adeno-associated virus
atggctgccgatggttatcttccagattggctcgaggacaacctctctgagggcatccgcgagtggtgggacttgaaacctggagccccgaaacccaaagccaaccagcaaaagcaggacgacggccggggtctggtgcttcctggctacaagtacctcggacccttcaacggactcgacaagggagagccggtcaacgaggcagacgccgcggccctcgagcacgacaaggcctacgacaagcagctcgagcagggggacaacccgtacctcaagtacaaccacgccgacgccgagtttcaggagcgtcttcaagaagatacgtcttttgggggcaacctcgggcgagcagtcttccaggccaagaagcgggttctcgaacctctcggtctggttgaggaaggcgctaagacggctcctggaaagaagagaccggtagagccatcaccccagcgttctccagactcctctacgggcatcggcaagacaggccagcagcccgcgaaaaagagactcaactttgggcagactggcgactcagagtcagtgcccgaccctcaaccaatcggagaaccccccgcaggcccctctggtctgggatctggtacaatggctgcaggcggtggcgctccaatggcagacaataacgaaggcgccgacggagtgggtagttcctcaggaaattggcattgcgattccacatggctgggcgacagagtcatcaccaccagcacccgaacctgggccctccccacctacaacaaccacctctacaagcaaatctccaacgggacatcgggaggaagcaccaacgacaacacctacttcggctacagcaccccctgggggtattttgactttaacagattccactgccacttctcaccacgtgactggcagcgactcatcaacaacaactggggattccggcccaagagactcaacttcaagctcttcaacatccaggtcaaggaggtcacgcagaatgaaggcaccaagaccatcgccaataaccttaccagcacgattcaggtctttacggactcggaataccagctcccgtacgtcctcggctctgcgcaccagggctgcctgcctccgttcccggcggacgtcttcatgattcctcagtacgggtacctgactctgaacaacggcagtcaggccgtgggccgttcctccttctactgcctggagtactttccttctcaaatgctgagaacgggcaacaactttgagttcagctaccagtttgaggacgtgccttttcacagcagctacgcgcacagccaaagcctggaccggctgacgaaccccctcatcgaccagtacctgtactacctggcccggacccagagcactacggggtccacaagggggctgcagttccatcaggctgggcccaacaccatggccgagcaatcaaagaactggctgcccggaccctgttatcggcagcagagactgtcaaaaaacatagacagcaacaacaacagtaactttgcctggaccggggccactaaataccatctgaatggtagaaattcattaaccaacccgggcgtagccatggccaccaacaaggacgacgaggaccagttctttcccatcaacggagtgctggtttttggcaaaacgggggctgccaacaagacaacgctggaaaacgtgctaatgaccagcgaggaggagatcaaaaccaccaatcccgtggctacagaagaatacggtgtggtctccagcaacctgcaatcgtctacggccggaccccagacacagactgtcaacagccagggggctctgcccggcatggtctggcagaaccgggacgtgtacctgcagggtcccatctgggccaaaattcctcacacggacggcaactttcacccgtctcccctgatgggcggatttggactcaaacacccgcctcctcaaattctcatcaagtatacttccaactactacaaatctacaaatgtggactttgctgtcaatactgagggtacttattcagagcctcgccccattggcacccgttacctcacccgtaacctgtaa

SEQ ID NO: 277 - DNA, 2187 bp, Non-human primate Adeno-associated virus
atggctgccgatggttatcttccagattggctcgaggacaacctctctgagggcattcgcgagtggtgggacttgaaacctggagccccgaaacccaaagccaaccagcaaaagcaggacgacggccggggtctggtgcttcctggctacaagtacctcggacccttcaacggactcgacaagggagagccggtcaacgcggcggacgcagcggccctcgagcacgacaaggcctacgaccagcagctcaaagcgggtgacaatccgtacctgcggtataaccacgccgacgccgagtttcaggagcgtcttcaagaagatacgtcttttgggggcaacctcgggcgagcagtcttccaggccaagaagcgggttctcgaacctctcggtctggttgaggaaggcgctaagacggctcctggaaagaagagacccatagaatcccccgactcctccacgggcatcggcaagaaaggccagcagcccgctaaaaagaagctcaactttgggcagactggcgactcagagtcagtgcccgaccctcaaccaatcggagaaccccccgcaggcccctctggtctgggatctggtacaatggctgcaggcggtggcgctccaatggcagacaataacgaaggcgccgacggagtgggtaatgcctccggaaattggcattgcgattccacatggctgggcgacagagtcatcaccaccagcacccgcacctgggccctgcccacctacaacaaccacctctacaagcagatatcaagtcagagcggggctaccaacgacaaccacttcttcggctacagcaccccctggggctattttgacttcaacagattccactgccacttctcaccacgtgactggcagcgactcatcaacaacaactggggattccggcccagaaagctgcggttcaagttgttcaacatccaggtcaaggaggtcacgacgaacgacggcgttacgaccatcgctaataaccttaccagcacgattcaggtcttctcggactcggagtaccaactgccgtacgtcctcggctctgcgcaccagggctgcctccctccgttccctgcggacgtgttcatgattcctcagtacggatatctgactctaaacaacggcagtcagtctgtgggacgttcctccttctactgcctggagtactttccttctcagatgctgagaacgggcaataactttgaattcagctacacctttgaggaagtgcctttccacagcagctatgcgcacagccagagcctggaccggctgatgaatcccctcatcgaccagtacctgtactacctggcccggacccagagcactacggggtccacaagggagctgcagttccatcaggctgggcccaacaccatggccgagcaatcaaagaactggctgcccggaccctgttatcggcggcagagactgtcaaaagacatagacagcaacaacaacagtaactttgcctggaccggggccactaaataccatctgaatggtagaaattcattaaccaacccgggcgtagccatggccaccaacaaggacgacgaggaccagttctttcccatcaacggagtgctggtttttggcaaaacgggggctgccaacaagacaacgctggaaaacgtgctaatgaccagcgaggaggagatcaaaaccaccaatcccgtggctacagaagaatacggtgtggtctccagcaacctgcaatcgtctacggccggaccccagacacagactgtcaacagccagggggctctgcccggcatggtctggcagaaccgggacgtgtacctgcagggtcccatctgggccaaaattcctcacacggacggcaactttcacccgtctcccctgatgggcggatttggactcaaacacccgcctcctcaaattctcatcaaaaacaccccggtacctgctaatcctccagaggtgtttactcctgccaagtttgcctcatttatcacgcagtacagcaccggccaggtcagcgtggagatcgagtgggaactgcagaaagagaacagcaaacgctggaatccagagattcagtacacctcaaattatgccaagtctaataatgtggaatttgctgtcaacaacgaaggggtttatactgagcctcgccccattggcacccgttacctcacccgtaacctgtaa

SEQ ID NO: 278 - DNA, 2217 bp, Non-human primate Adeno-associated virus
atggctgccgatggttatcttccagattggcttgaggacaacctctctgagggcattcgcgagtggtgggacctgaaacctggagccccgaaacccaaagccaaccagcaaaagcaggacgacggccggggtctggtgcttcctggctacaagtacctcggacccttcaacggactcgacaagggggagcccgtcaacgcggcggacgcagcggccctcgagcacgacaaggcctacgaccagcagctcaaagcgggtgacaatccgtacctgcggtataaccacgccgacgccgagtttcaggagcgtctgcaagaagatacgtcttttgggggcaacctcgggcgagcagtcttccaggccaagaagcgggttctcgaacctctcggtctggttgaggaaggcgctaagacggctcctggaaagaagagaccggtagagccatcacctcagcgttcccccgactcctccacgggcatcggcaagaaaggccaccagcccgcgagaaagagactgaactttgggcagactggcgactcggagtcagtccccgaccctcaaccaatcggagaaccaccagcaggcccctctggtctgggatctggtacaatggctgcaggcggtggcgctccaatggcagacaataacgaaggcgccgacggagtgggtagttcctcaggaaattggcattgcgattccacatggctgggcgacagagtcatcaccaccagcacccgaacctgggccctgcccacctacaacaaccatctctacaagcaaatctccaacgggacatcgggaggaagcactaacgacaacacctactttggctacagcaccccctgggggtattttgacttcaacagattccactgccacttctcaccacgtgactggcagcgactcatcaacaataactggggattccggcccaagagactcaacttcaagctcttcaacatccaggtcaaggaggtcacgcagaatgaaggcaccaagaccatcgccaataaccttaccagcacgattcaggtgtttacggactcggaataccagctcccgtacgtccccggctctgcgcaccagggctgcctccctccgttcccggcggacgtcttcatgattcctcagtacgggtatctgaccctaaacaatggcagtcaggctgtgggccgttcctccttctactgcctggaatacttcccttctcaaatgctgaggacgggcaacaactttgaattcagctacaccttcgaggacgtgcctttccacagcagctacgcgcacagccagagcctggaccggctgatgaaccctctcatcgaccagtacctgtattacttatccagaactcagtccacaggaggaactcaaggtactcagcaattgttattttctcaagccgggcccgcaaacatgtcggctcaggccaagaactggctacctggaccgtgttaccgtcagcaacgagtttccacgacactgtcgcaaaacaacaacagcaattttgcttggaccggtgccaccaagtatcacctgaatggcagagactccctggttaatcccggcgttgccatggctacccacaaggacgacgaggagcgcttcttcccgtcaagcggagttctaatgtttggcaagcagggggctggaaaagacaatgtggactacagcagcgtgatgctcaccagcgaagaagaaattaaaactactaacccagtggctacagagcagtatggtgtggtggcagacaacctgcagcagaccaacggagctcccattgtgggaactgtcaacagccagggggccttacctggtatggtctggcaaaaccgggacgtgtacctgcagggccccatctgggccaaaattcctcacacggacggcaactttcatccttcgccgctgatgggaggctttggactgaaacacccgcctcctcagatcctggtgaaaaacactcctgttcctgcggatcctccgaccaccttcagccaggccaagctggcttcttttatcacgcagtacagcaccggacaggtcagcgtggaaatcgaatgggagctgcagaaagaaaacagcaagcgctggaacccagagattcagtatacttccaactactacaaatctacaaatgtggactttgctgtcaatactgagggtacttattcagagcctcgccccattggcactcgttatctcacccgtaatctgtaa

SEQ ID NO: 279 - DNA, 2208 bp, Non-human primate Adeno-associated virus
atggctgccgatggttatcttccagattggctcgaggacaacctctctgagggcattcgcgagtggtgggacttgaaacctggagccccgaaacccaaagccaaccagcaaaagcaggacgacggccggggtctggtgcttcctggctacaagtacctcggacccttcaacggactcgacaagggagagccggtcaacgaggcagacgccgcggccctcgagcacgacaaggcctacgacaagcagctcgagcagggggacaacccgtacctcaagtacaaccacgccgacgccgagtttcaggagcgtcttcaagaagatacgtcttttgggggcaacctcgggcgagcagtcttccaggccaagaagcgggttctcgaacctctcggtctggttgaggaaggcgctaagacggctcctggaaagaagagaccggtagagccatcaccccagcgttctccagactcctctacgggcatcggcaagacaggccagcagcccgcgaaaaagagactcaactttgggcagactggcgactcagagtcagtgcccgaccctcaaccaatcggagaaccccccgcaggcccctctggtctgggatctggtacaatggctgcaggcggtggcgctccaatggcagacaataacgaaggcgccgacggagtgggtagttcctcaggaaattggcattgcgattccacatggctgggcgacagagtcatcaccaccagcacccgaacctgggccctccccacctacaacaaccacctctacaagcaaatctccaacgggacatcgggaggaagcaccaacgacaacacctacttcggctacagcaccccctgggggtattttgactttaacagattccactgccacttctcaccacgtgactggcagcgactcatcaacaacaactggggattccggcccagaaagctgcggttcaagttgttcaacatccaggtcaaggaggtcacgacggacgacggcgttacgaccatcgctaataaccttaccagcacgattcaggtcttctcggactcggagtaccaactgccgtacgtcctcggctctgcgcaccagggctgcctccctccgttccctgcggacgtgttcatgattcctcagtacggatatctgactctaaacaacggcagtcagtctgtgggacgttcctccttctactgcctggagtactttccttctcagatgctgagaacgggcaataactttgaattcagctacacctttgaggaagtgcctttccacagcagctatgcgcatagccagagcctggaccggctgatgaatcccctcatcgaccagtacctgtactacctggcccggacccagagcactacggggtccacaagggagctgcagttccatcaggctgggcccaacaccatggccgagcaatcaaagaactggctgcccggaccctgttatcggcagcagagactgtcaaaaaacatagacagcaacaacaacagtaactttgcctggaccggggccactaaataccatctgaatggtagaaattcattaaccaacccgggcgtagccatggccaccaacaaggacgacgaggaccagttctttcccatcaacggagtgctggtttttggcaaaacgggggctgccaacaagacaacgctggaaaacgtgctaatgaccagcgaggaggagatcaaaaccaccaatcccgtggctacagaagaatacggtgtggtctccagcaacctgcaatcgtctacggccggaccccagacacagactgtcaacagccagggggctctgcccggcatggtctggcagaaccgggacgtgtacctgcagggtcccatctgggccaaaattcctcacacggacggcaactttcacccgtctcccctgatggacggatttggactcaaacacccgcctcctcaaattctcatcaaaaacaccccggtacctgctaatcctccagaggtgtttactcctgccaagtttgcctcatttatcacgcagtacagcaccggccaggtcagcgtggagatcgagtgggaactgcagaaagaaaacagcaaacgctggaatccagagattcagtacacctcaaattatgccaagtctaataatgtggaatttgctgtcaacaacgaaggggtttatactgagcctcgccccattggcacccgttacctcacccgtaacctgtaa

SEQ ID NO: 280 - DNA, 2217 bp, Non-human primate Adeno-associated virus
atggctgccgatggttatcttccagattggctcgaggacaacctctctgagggcattcgcgagtggtgggacttgaaacctggagccccgaaacccaaagccaaccagcaaaagcaggacgacggccggggtctggtgcttcctggctacaagtacctcggacccttcaacggactcgacaagggagagccggtcaacgaggcagacgccgcggccctcgagcacgacaaggcctacgacaagcagctcgagcagggggacaacccgtacctcaagtacaaccacgccgacgccgagtttcaggagcgtcttcaagaagatacgtcttttgggggcaacctcgggcgagcagtcttccaggccaagaagcgggttctcgaacctctcggtctggttgaggaaggcgctaagacggctcctggaaagaagagaccggtagagccatcaccccagcgttctccagactcctctacgggcatcggcaagacaggccagcagcccgcgaaaaagagactcaactttgggcagactggcgactcagagtcagtgcccgaccctcaaccaatcggagaaccccccgcaggcccctctggtctgggatctggtacaatggctgcaggcggtggcgctccaatggcagacaataacgaaggcgccgacggagtgggtagttcctcaggaaattggcattgcgattccacatggctgggcgacagagtcatcaccaccagcacccgaacctgggccctccccacctacaacaaccacctctacaagcaaatctccaacgggacatcgggaggaagcaccaacgacaacacctacttcggctacagcaccccctgggggtattttgactttaacagattccactgccacttctcaccacgtgactggcagcgactcatcaacaacaactggggattccggcccaagagactcaacttcaagctcttcaacatccaggtcaaggaggtcacgcagaatgaaggcaccaagaccatcgccaataaccttaccagcacgattcaggtctttacggactcggaataccagctcccgtacgtcctcggctctgcgcaccagggctgcctgcctccgttcccggcggacgtcttcatgattcctcagtacgggtacctgactctgaacaacggcagtcaggccgtgggccgttcctccttctactgcctggagtactttccttctcaaatgctgagaacgggcaacaactttgagttcagctaccagtttgaggacgtgccttttcacagcagctacgcgcacagccaaagcctggaccggctgatgaaccccctcatcgaccagtacctgtactacctgtctcggactcagtccacgggaggtaccgcaggaactcagcagttgctattttctcaggccgggcctaataacatgtcggctcaggccaaaaactggctacccgggccctgctaccggcagcaacgcgtctccacgacactgtcgcaaaataacaacagcaactttgcttggaccggtgccaccaagtatcatctgaatggcagagactctctggtaaatcccggtgtcgctatggcaacgcacaaggacgacgaagagcgattttttccatccagcggagtcttgatgtttgggaaacagggagctggaaaagacaacgtggactatagcagcgttatgctaaccagtgaggaagaaatcaaaaccaccaacccagtggccacagaacagtacggcgtggtggccgataacctgcaacagcaaaacgccgctcctattgtaggggccgtcaacagtcaaggagccttacctggcatggtctggcagaaccgggacgtgtacctgcagggtcctatctgggccaagattcctcacacggacggcaactttcatccttcgccgctgatgggaggctttggactgaaacacccgcctcctcagatcctgattaagaatacacctgttcccgcggatcctccaactaccttcagtcaagccaagctggcgtcgttcatcacgcagtacagcaccggacaggtcagcgtggaaattgaatgggagctgcagaaagagaacagcaagcgctggaacccagagattcagtatacttccaactactacaaatctacaaatgtggactttgctgtcaatactgagggtacttattcagagcctcgccccattggcacccgttacctcacccgtaacctgtaa

SEQ ID NO: 281 - DNA, 2196 bp, Non-human primate Adeno-associated virus
atggctgccgatggttatcttccagattggctcgaggacaacctctctgagggcattcgcgagtggtgggacttgaaacctggagccccgaaacccaaagccaaccagcaaaagcaggacgacggccggggtctggtgcttcctggctacaagtacctcggacccttcaacggactcgacaagggagagccggtcaacgaggcagacgccgcggccctcgagcacgacaaggcctacgacaagcagctcgagcagggggacaacccgtacctcaagtacaaccacgccgacgccgagtttcaggagcgtcttcaagaagatacgtcttttgggggcaacctcgggcgagcagtcttccgggccaagaagcgggttctcgaacctctcggtctggttgaggaaggcgctaagacggctcctggaaagaagagacccatagaatcccccgactcctccacgggcatcggcaagaaaggccagcagcccgctaaaaagaagctcaactttgggcagactggcgactcagagtcagtgcccgacccccaacctctcggagaacctcccgccgcgccctcaggtctgggatctggtacaatggctgcaggcggtggcgcaccaatggcagacaataacgaaggcgccgacggagtgggtaatgcctccggaaattggcattgcgattccacatggctgggcgacagagtcatcaccaccagcacccgcacctgggccctgcccacctacaacaaccacctctacaagcagatatcaagtcagagcggggctaccaacgacaaccacttcttcggctacagcaccccctggggctattttgacttcaacagattccactgccacttctcaccacgtgactggcagcgactcatcaacaacaaccggggattccggcccagaaagctgcggttcaagttgttcaacatccaggtcaaggaggtcacgacgaacgacggcgttacgaccatcgctaataaccttaccagcacgattcaggtcttctcggactcggagtaccaactgccgtacgtcctcggctctgcgcaccagggctgcctccctccgttccctgcggacgtgttcatgattcctcagtacggatatctgactctaaacaacggcagtcagtctgtgggacgttcctccttctactgcctggagtactttccttctcagatgctgagaacgggcaataactttgaattcagctaccagtttgaggacgtgccctttcacagcagctacgcgcacagccaaagcctggaccggctgatgaaccccctcatcgaccagtacctgtactacctgtctcggactcagtccacgggaggtaccgcaggaactcagcagttgctattttctcaggccgggcctaataacatgtcggctcaggccaaaaactggctacccgggccctgctaccggcagcaacgcgtctccacgacactgtcgcaaaataacaacagcaactttgcttggaccggtgccaccaagtatcatctgaatggcagagactctctggtaaatcccggtgtcgctatggcaacgcacaaggacgacgaagagcgattttttccatccagcggagtcttgatgtttgggaaacagggagctggaaaagacaacgtggactatagcagcgttatgctaaccagtgaggaagaaatcaaaaccaccaacccagtggccacagaacagtacggcgtggtggccgataacctgcaacagcaaaacgccgctcctattgtaggggccgtcaacagtcaaggagccttacctggcatggcctggcagaaccgggacgtgtacctgcagggtcctatctgggccaagattcctcacacggacggcaactttcatccttcgccgctgatgggaggctttggactgaaacacccgcctcctcagatcctgattaagaatacacctgttcccgcggatcctccaactaccttcagtcaagccaagctggcgtcgttcatcacgcagtacagcaccggacaggtcagcgtggaaattgaatgggagctgcagaaagagaacagcaagcgctggaacccagagattcagtatacttccaactactacaaatctacaaatgtggactttgctgtcaatactgagggtacttattcagagcctcgccccattggcacccgttacctcacccgtaacctgtaa

SEQ ID NO: 282 - DNA, 2196 bp, Non-human primate Adeno-associated virus
atggctgccgatggttatcttccagattggctcgaggacaacctctctgagggcattcgcgagtggtgggacttgaaacctggagccccgaaacccaaagccaaccagcaaaagcaggacgacggccggggtctggtgcttcctggctacaagtacctcggacccttcaacggactcgacaagggagagccggtcaacgaggcagacgccgcggccctcgagcacgacaaggcctacgacaagcagctcgagcagggggacaacccgtacctcaagtacaaccacgccgacgccgagtttcaggagcgtcttcaagaagatacgtcttttgggggcaacctcgggcgagcagtcttccaggccaagaagcgggttctcgaacctctcggtctggttgaggaaggcgctaagacggctcctggaaagaagagacccatagaatcccccgactcctccacgggcatcggcaagaaaggccagcagcccgctaaaaagaagctcaactttgggcagactggcgactcagagtcagtgcccgaccctcaaccaatcggagaaccccccgcaggcccctctggtctgggatctggtacaatggctgcaggcggtggcgctccaatggcagacaataacgaaggcgccgacggagtgggtaatgcctccggaaattggcattgcgattccacatggctgggcgacagagtcatcaccaccagcacccgcacctgggccctgcccacctacaacaaccacctctacaagcagatatcaagtcagagcggggctaccaacgacaaccacttcttcggctacagcaccccctggggctattttgacttcaacagattccactgccacttctcatcacgtgactggcagcgactcatcaacaacaactggggattccggcccaagagactcaacttcaagctcttcaacatccaggtcaaggaggtcacgcagaatgaaggcaccaagaccatcgccaataaccttaccagcacgattcaggtctttacggactcggaataccggctcccgtacgtcctcggctctgcgcaccagggctgcctgcctccgttcccggcggacgtcttcatgattcctcagtacgggtacctgactctgaacaacggcagtcaggccgtgggccgttcctccttctactgcctggagtactttccttctcaaatgctgagaacgggcaacaactttgagttcagctaccagtttgaggacgtgccttttcacagcagctacgcgcacagccaaagcctggaccggctgatgaaccccctcatcgaccagtacctgtactacctgtctcggactcagtccacgggaggtaccgcaggaactcagcagttgctattttctcaggccgggcctaataacatgtcggctcaggccaaaaactggctacccgggccctgctaccggcagcaacgcgtctccacgacactgtcgcaaaataacaacagcaactttgcttggaccggtgccaccaagtatcatctgaatggcagagactctctggtaaatcccggtgtcgctatggcaacgcacaaggacgacgaagagcgattttttccatccagcggagtcttgatgtttgggaaacagggagctggaaaagacaacgtggactatagcagcgttatgctaaccagtgaggaagaaatcaaaaccaccaacccagtggccacagaacagtacggcgtggtggccgataacctgcaacagcaaaacgccgctcctattgtaggggccgtcaacagtcaaggagccttacctggcatggtctggcagaaccgggacgtgtacctgcagggtcctatctgggccaagattcctcacacggacggcaactttcatccttcgccgctgatgggaggctttggactgaaacacccgcctcctcagatcctgattaagaatacacctgttcccgcggatcctccaactaccttcagtcaagccaagccggcgtcgttcatcacgcagtacagcaccggacaggtcagcgtggaaattgaatgggagctgcagaaagagaacagcaagcgctggaacccagagattcagtatacttccaactactacaaatctacaaatgtggactttgctgtcaatactgagggtacttattcagagcctcgccccattggcacccgttacctcacccgtaacctgtaa

SEQ ID NO: 283 - DNA, 2202 bp, Non-human primate Adeno-associated virus
atggctgccgatggtcatcttccagattggctcgaggacaacctctctgagggcattcgcgagtggtgggacttgaaacctggagccccgaaacccaaagccaaccagcaaaagcaggacgacggccggggtctggtgcttcctggctacaagtacctcggacccttcaacggactcgacaagggggagcccgtcaacgcggcggacgcagcggccctcgagcacgacaaggcctacgaccagcagctcaaagcgggtgacaatccgtacctgcggtataaccacgccgacgccgagtttcaggagcgtcttcaagaagatacgtcttttgggggcaacctcgggcgagcagtcttccaggccaagaagcgggttctcgaacctctcggtctggttgaggaaggcgctaagacggctcctggaaagaagagacccatagaatcccccgactcctccacgggcatcggcaagaaaggccagcagcccgctaaaaagaagctcaactttgggcagactggcgactcagagtcagtgcccgaccctcaaccaatcggagaaccccccgcaggcccctctggtctgggatctggtacaatggctgcaggcggtggcgctccaatggcagacaataacgaaggcgccgacggagtgggtagttcctcaggaaattggcattgcgattccacatggctgggcgacagagtcatcaccaccagcacccgaacctgggccctccccacctacaacaaccacctctacaagcaaatctccaacgggacatcgggaggaagcaccaacgacaacacctacttcggctacagcaccccctgggggtattttgactttaacagattccactgccacttctcaccacgtgactggcagcgactcatcaacaacagctggggattccggcccaagagactcaacttcaagctcttcaacatccaggtcaaggaggtcacgcagaatgaaggcaccaagaccatcgccaataaccttaccagcacgattcaggtctttacggactcggaataccagctcccgtacgtcctcggctctgcgcaccagggctgcctgcctccgttcccggcggacgtcttcatgattcctcagtacgggtacctgactctgaacaacggcagtcaggccgtgggccgttcctccttctactgcctggagtactttccttctcaaatgctgagaacgggcaacaactttgagttcagctaccagtttgaggacgtgccttttcacagcagctacgcgcacagccaaagcctggaccggctgatgaaccccctcatcgaccagtacctgtactacctgtctcggactcagtccacgggaggtaccgcaggaactcagcagttgctattttctcaggccgggcctaataacatgtcggctcaggccaaaaactggctacccgggccctgctaccggcagcaacgcgtctccacgacactgtcgcaaaataacaacagcaactttgcttggaccggtgccaccaagtatcatctgaatggcagagactctctggtaaatcccggtgtcgctatggcaacgcacaaggacgacgaagagcgattttttccatccagcggagtcttgatgtttgggaaacagggagctggaaaagacaacgtggactatagcagcgttatgctaaccagtgaggaagaaatcaaaaccaccaacccagtggccacagaacagtacggcgtggtggccgataacctgcaacagcaaaacgccgctcctattgtaggggccgtcaacagtcaaggagccttacctggcatggtctggcagaaccgggacgtgtacctgcagggtcctatctgggccaagattcctcacacggacggcaactttcatccttcgccgctgatgggaggctttggactgaaacacccgcctcctcagatcctgattaagaatacacctgttcccgcggatcctccaactaccttcagtcaagccaagctggcgtcgttcatcacgcagtacagcaccggacaggtcagcgtggaaattgaatgggagctgcagaaagagaacagcaagcgctggaacccagagattcagtatacttccaactactacaaatctacaaatgtggactttgctgtcaatactgagggtacttattcagagcctcgccccattggcacccgttacctcacccgtaacctgtaa

SEQ ID NO: 284 - DNA, 2187 bp, Non-human primate Adeno-associated virus
atggctgccgatggttatcttccagattggctcgaggacaacctctctgagggcattcgcgagtggtgggacttgaaacctggagccccgaaacccaaagccaaccagcaaaagcaggacgacggccggggtctggtgcttcctggctacaagtacctcggacccttcaacggactcgacaagggagagccggtcaacgaggcagacgccgcggccctcgagcacgacaaggcctacgacaagcagctcgagcagggggacaacccgtacctcaagtacaaccacgccgacgccgagtttcaggagcgtcttcaagaagatacgtcttttgggggcaacctcgggcgagcagtcttccaggccaagaagcgggttctcgaacctctcggtctggttgaggaaggcgctaagacggctcctggaaagaagagacccatagaatcccccgactcctccacgggcatcggcaagaaaggccagcagcccgctaaaaagaagctcaactttgggcagactggcgactcagagtcagtgcccgacccccaacctctcggagaacctcccgccgcgccctcaggtctgggatctggtacaatggctgcaggcggtggcgcaccaatggcagacaataacgaaggcgccgacggagtgggtaatgcctccggaaattggcattgcgattccacatggctgggcgacagagtcatcaccaccagcacccgcacctgggccctgcccacctacaacaaccacctctacaagcagatatcaagtcagagcggggctaccaacgacaaccacttcttcggctacagcaccccctggggctattttgacttcaacagattccactgccacttctcaccacgtgactggcagcgactcatcaacaacaactggggattccggcccagaaagctgcggttcaagttgttcaacatccaggtcaaggaggtcacgacgaacgacggcgttacgaccatcgctaataaccttaccagcacgattcaggtcttctcggactcggagtaccaactgccgtacgtcctcggctctgcgcaccagggctgcctccctccgttccctgcggacgtgttcatgattcctcagtacggatatctgactctaaacaacggcagtcagtctgtgggacgttcctccttctactgcctggagtactttccttctcagatgctgagaacgggcaataactttgaattcagctacacctttgaggaagtgcctttccacagcagctatgcgcacagccagagcctggaccggctgatgaatcccctcatcgaccagtacctgtactacctggcccggacccagagcactacggggtccacaagggagctgcagttccatcaggctgggcccaacaccatggccgagcaatcaaagaactggctgcccggaccctgttatcggcagcagagactgtcaaaaaacatagacagcaacaacaacagtaactttgcctggaccggggccactaaataccatctgaatggtagaaattcattaaccaacccgggcgtagccatggccaccaacaaggacgacgaggaccagttctttcccatcaacggagtgctggtttttggcgaaacgggggctgccaacaagacaacgctggaaaacgtgctaatgaccagcgaggaggagatcaaaaccaccaatcccgtggctacagaagaatacggtgtggtctccagcaacctgcaatcgtctacggccggaccccagacacagactgtcaacagccagggggctctgcccggcatggtctggcagaaccgggacgtgtacctgcagggtcccatctgggccaaaattcctcacacggacggcaactttcacccgtctcccctgatgggcggatttggactcaaacacccgcctcctcaaattctcatcaaaaacaccccggtacctgctaatcctccagaggtgtttactcctgccaagtttgcctcatttatcacgcagtacagcaccggccaggtcagcgtggagatcgagtgggaactgcagaaagaaaacagcaaacgctggaatccagagattcagtacacctcaaattatgccaagtctaataatgtggaatttgctgtcaacaacgaaggggtttatactgagcctcgccccattggcacccgttacctcacccgtaacctgtaa

SEQ ID NO: 285 - DNA, 2202 bp, Non-human primate Adeno-associated virus
atggctgccgatggttatcttccagattggctcgaggacaacctctctgagggcattcgcgagtggtgggacttgagacctggagccccgaaacccaaagccaaccagcaaaagcaggacgacggccggggtctggtgcttcctggctacaagtacctcggacccttcaacggactcgacaagggagagccggtcaacgaggcagacgccgcggccctcgagcacgacaaggcctacgacaagcagctcgagcagggggacaacccgtacctcaagtacaaccacgccgacgccgagtttcaggagcgtcttcaagaagatacgtcttttgggggcaacctcgggcgagcagtcttccaggccaagaagcgggttctcgaacctctcggtctggttgaggaaggcgctaagacggctcctggaaagaagagacccatagaatcccccgactcctccacgggcatcggcaagaaaggccagcagcccgctaaaaagagactcaactttgggcagactggcgactcagagtcagtgcccgaccctcaaccaatcggagaaccccccgcaggcccctctggtctgggatctggcacaatggctgcaggcggtggcgctccaatggcagacaataacgaaggcgccgacggagtgggtagttcctcaggaaattggcattgcgattccacatggctgggcgacagagtcatcaccaccagcacccgaacctgggccctccccacctacaacaaccacctctacaagcaaatctccaacgggacatcgggaggaagcaccaacgacaacacctacttcggctacagcaccccctgggggtattttgactttaacagattccactgccacttctcaccacgtgactggcagcgactcatcaacaacaactggggattccggcccaagagactcaacttcaagctcttcaacatccaggtcaaggaggtcacgcagaatgaaggcaccaagaccatcgccaataaccttaccagcacgattcaggtctttacggactcggaataccagctcccgtacgtcctcggctctgcgcaccagggctgcctgcctccgttcccggcggacgtcttcatgattcctcagtacgggtacctgactctgaacaacggcagtcaggccgtgggccgttcctccttctactgcctggagtactttccttctcaaatgctgagaacgggcaacaactttgagttcagctaccagtttgaggacgtgccttttcacagcagctatgcgcacagccaaagcctggaccggctgatgaaccccctcatcgaccagtacctgtactacctgtctcggactcagtccacgggaggtaccgcaggaactcagcagttgctattttctcaggccgggcctaataacatgtcggctcaggccaaaaactggctacccgggccctgctaccggcagcaacgcgtctccacgacagtgtcgcaaaataacaacagcaactttgcttggaccggtgccaccaagtatcatctgaatggcagagactctctggtaaatcccggtgtcgctatggcaacgcacaagggcgacgaagagcgattttttccatccagcggagtcttgatgtttgggaaacagggagctggaaaagacaacgtagactatagcagcgttatgctaaccagtgaggaagaaatcaaaaccaccaacccagtggccacagaacagtacggcgtggtggccgataacctgcaacagcaaaacgccgctcctattgtaggggccgtcaacagtcaaggagccttacctggcatggtctggcagaaccgggacgtgtacctgcagggtcctatctgggccaagattcctcacacggacggcaactttcatccttcgccgctgatgggaggctttggactgaaacacccgcctcctcagatcctgattaagaatacacctgttcccgcggatcctccaactaccttcagtcaagccaagctggcgtcgttcatcacgcagtacagcaccggacaggtcagcgtggaaattgaatgggagctgcagaaagagaacagcaagcgctggaacccagagattcagtatacttccaactactacaaatctacaaatgtggactttgctgtcaatactgagggtacttattcagagcctcgccccattggcacccgttacctcacccgtaacctgtaa

SEQ ID NO: 286 - DNA, 2217 bp, Non-human primate Adeno-associated virus
atggctgccgatggttatcttccagattggctcgaggacaacctctctgagggcattcgcgagtggtgggacttgaaacctggagccccgaaacccaaagccaaccagcaaaagcaggacgacggccggggtctggtgcttcctggctacaagtacctcggacccttcaacggactcgacaagggggagcccgtcaacgcggcggacgcagcggccctcgagcacgacaaggcctacgaccagcagctcaaagcgggtgacaatccgtacctgcggtataaccacgccgacgccgagtttcaggagcgtctgcaagaagatacgtcttttgggggcaacctcgggcgagcagtcttccaggccaagaagcgggttctcgaacctctcggtctggttgaggaaggcgctaagacggctcctggaaagaagagaccggtagagccatcaccccagcgttctccagactcctctacgggcatcggcaagaaaggccagcagcccgcgaaaaagagactcaactttgggcagactggcgactcagagtcagtgcccgaccctcaaccaatcggagaaccccccgcaggcccctctggtctgggatctggtacaatggctgcaggcggtggcgctccaatggcagacaataacgaaggcgccgacggagtgggtagttcctcaggaaattggcattgcgattccacatggctgggcgacagagtcatcaccaccagcacccgaacctgggccctccccacctacaacaaccacctctacaagcaaatctccaacgggacttcgggaggaagcaccaacgacaacacctacttcggctacagcaccccctgggggtattttgactttaacagattccactgccacttctcaccacgtgactggcagcgactcatcaacaacaactggggattccggcccaagagactcaacttcaagctcttcaacatccaggtcaaggaggtcacgcagaatgaaggcaccaagaccatcgccaataaccttaccagcacgattcaggtctttacggactcggaataccagctcccgtacgtcctcggctctgcgcaccagggctgcctgcctccgttcccggcggacgtcttcatgattcctcagtacgggtacctgactctgaacaatggcagtcaggccgtgggccgttcctccttctactgcctggagtactttccttctcaaatgctgagaacgggcaacaactttgagttcagctaccagtttgaggacgtgccttttcacagcagctacgcgcacagccaaagcctggaccggctgatgaaccccctcatcgaccagtacctgtactacctgtctcggactcagtccacgggaggtaccgcaggaactcagcagttgctattttctcaggccgggcctaataacatgtcggctcaggccaaaaactggctacccgggccctgctaccggcagcaacgcgtctccacgacactgtcgcaaaataacaacagcaactttgcctggaccggtgccaccaagtatcatctgaatggcagagactctctggtaaatcccggtgtcgctatggcaacccacaaggacgacgaagagcgattttttccgtccagcggagtcttaatgtttgggaaacagggagctggaaaagacaacgtggactatagcagcgttatgctaaccagtgaggaagaaattaaaaccaccaacccagtggccacagaacagtacggcgtggtggccgataacctgcaacagcaaaacgccgctcctattgtaggggccgtcaacagtcaaggagccttacctggcatggtctggcagaaccgggacgtgtacctgcagggtcctatctgggccaagattcctcacacggacggaaactttcatccctcgccgctgatgggaggctttggactgaaacacccgcctcctcagatcctgattaagaatacacctgttcccgcggatcctccaactaccttcagtcaagctaagctggcgtcgttcatcacgcagtacagcaccggacaggtcagcgtggaaattgaatgggagctgcagaaagaaaacagcaaacgctggaacccagagattcaatacacttccaactactacaaatctacaaatgtggactttgctgttaacacagatggcacttattctgagcctcgccccatcggcacccgttacctcacccgtaatctgtaa

SEQ ID NO: 287 - DNA, 2187 bp, Non-human primate Adeno-associated virus
atggctgccgatggttatcttccagattggctcgaggacaacctctctgagggcattcgcgagtggtgggacttgaaacctggagccccgaaacccaaagccaaccagcaaaagcaggacgacggccggggtctggtgcttcctggctacaagtacctcggacccttcaacggactcgacaagggagagccggtcaacgaggcagacgccgcggccctcgagcacgacaaggcctacgacaagcagctcgagcagggggacaacccgtacctcaagtacaaccacgccgacgctgagtttcaggagcgtcttcaagaagatacgtcttttgggggcaacctcgggcgagcagtcttccaggccaagaagcgggttctcgaacctctcggtctggttgaggaaggcgctaagacggctcctggaaagaagagacccatagaatcccccgactcctccacgggcatcggcaagaaaggccagcagcccgctaaaaagaagctcaactttgggcagactggcgactcagagtcagtgcccgacccccaacctctcggagaacctcccgccgcgccctcaggtctgggatctggtacaatggctgcaggcggtggcgcaccaatggcagacaataacgaaggcgccgacggagtgggtaatgcctccggaaattggcattgcgattccacatggctgggcgacagagtcatcaccaccagcacccgcacctgggccctgcccacctacaacaaccacctctacaagcagatatcaagtcagagcggggctaccaacgacaaccacttcttcggctacagcaccccctggggctattttgacttcaacagattccactgccacttctcaccacgtgactggcagcgactcatcaacaacaactggggattccggcccagaaagctgcggttcaagttgttcaacatccaggtcaaggaggtcacgacgaacgacggcgttacgaccatcgctaataaccttaccagcacgattcaggtcttctcggactcggagtaccaactgccgtacgtcctcggctctgcgcaccagggctgcctccctccgttccctgcggacgtgttcatgattcctcagtacggatatctgactctaaacaacggcagtcagtctatgggacgttcctccttctactgcctggagtactttccttctcagatgctgagaacgggcaataactttgaattcagctacacctttgaggaagtgcctttccacagcagctatgcgcacagccagagcctggaccggctgatgaatcccctcatcgaccagtacctgtactacctggcccggacccagagcactacggggtccacaagggagctgcagttccatcaggctgggcccaacaccatggccgagcaatcaaagaactggctgcccggaccctgttatcggcagcagagactgtcaaaaaacatagacagcaacaacaacagtaactttgcctggaccggggccactaaataccatctgaatggtagaaattcattaaccaacccgggcgtagccatggccaccaacaaggacgacgagggccagttctttcccatcaacggagtgctggtttttggcaaaacgggggctgccaacaagacaacgctggaaaacgtgctaatgaccagcgaggaggagatcaaaaccaccaatcccgtggctacagaagaatacggtgtggtctccagcaacctgcaatcgtctacggccggaccccagacacagactgtcaacagccagggggctctgcccggcatggtctggcagaaccgggacgtgtacctgcagggtcccatctgggccaaaattcctcacacggacggcaactttcacccgtctcccctgatgggcggatttggactcaaacacccgcctcctcaaattctcatcaaaaacaccccggtacctgctaatcctccaggggtgtttactcctgccttgtttgcctcatttatcacgcagtacagcaccggccaggtcagcgtggagatcgagtgggaactgcagaaagaaaacagcaaacgctggaatccagagattcagtacacctcaaattatgccaagtctaataatgtggaatttgctgtcaacaacgaaggggtttatactgagcctcgccccattggcacccgttacctcacccgtaacctgtaa

SEQ ID NO: 288 - DNA, 2187 bp, Non-human primate Adeno-associated virus
atggctgccgatggttatcttccagattggctcgagggcaacctctctgagggcattcgcgagtggtgggacttgaaacctggagccccgaaacccaaagccaaccagcaaaagcaggacgacggccggggtctggtgcttcctggctacaggtacctcggacccttcaacggactcgacaagggagagccggtcaacgaggcagacgccgcggccctcgagcacgacaaggcctacgacaagcagctcgagcagggggacaacccgtacctcaagtacaaccacgccgacgccgagtttcaggagcgtcttcaagaagatacgtcttttgggggcaacctcgggcgagcagtcttccaggccaagaagcgggttctcgaacctctcggtctggttgaggaaggcgctaagacggctcctggaaagaagagacccatagaatcccccgactcctccacgggcatcggcaagaacggccagccgcccgctaaaaagaagctcaactttgggcagactggcgactcagagtcagtgcccgacccccaacctctcggagaacctcccgccgcgccctcaggtctgggatctggtacaatggctgcaggcggtggcgcaccaatggcagacaataacgaaggcgccgacggagtgggtaatgcctccggaaattggcattgcgattccacatggctgggcgacagagtcatcaccaccagcacccgcacctgggccctgcccacctacaacaaccacctctacaagcagatatcaagtcagagcggggctaccaacgacaaccacttcttcggctacagcaccccctggggctattttgacttcaacagattccactgccacttctcaccacgtgactggcagcgactcatcaacaacaactggggattccggcccagaaagctgcggttcaagttgttcaacatccaggtcaaggaggtcacgacgaacgacggcgttacgaccatcgctaataaccttaccagcacgattcaggtcttctcggactcggagtaccaactgccgtacgtcctcggctctgcgcaccagggctgcctccctccgttccctgcggacgtgttcatgattcctcagtacggatatctgactctaaacaacggcagtcagtctgtgggacgttcctccttctactgcctggagtactttccttctcagatgctgagaacgggcgataactttgaattcagctacacctttgaggaagtgcctttccacagcagctatgcgcacagccagagcctggaccggctgatgaatcccctcatcgaccagtacctgtactacctggcccggacccagagcactacggggtccacaagggagctgcagttccatcaggctgggcccaacaccatggccgagcaatcaaagaactggctgcccggaccctgttatcggcagcagagactgtcaaaaaacatagacagcaacaacaacagtaactttgcctggaccggggccactaaataccatctgaatggtagaaattcattaaccaacccgggcgtagccatggccaccaacaaggacgacgaggaccagttctttcccatcaacggagtgctggtttttggcaaaacgggggctgccaacaagacaacgctggaaaacgtgctaatgaccagcgaggaggagatcaaaaccaccaatcccgtggctacagaagaatacggtgtggtctccagcaacctgcaatcgtctacggccggaccccagacacagactgtcaacagccagggggctctgcccggcatggtctggcagaaccgggacgtgtacctgcagggtcccatctgggccaaaattcctcacacggacggcaactttcacccgtctcccctgatgggcggatttggactcaaacacccgcctcctcaaattctcatcaaaaacaccccggtacctgctaatcctccagaggtgtttactcctgccaagtttgcctcatttatcacgcagtacagcaccggccaggtcagcgtggagatcgagtgggaactgcagaaagaaaacagcaaacgctggaatccagagattcagtacacctcaaattatgccaagtctaataatgtggaatttgctgtcaacaacgaaggggtttatactgagcctcgccccattggcacccgttacctcacccgtaacctgtaa

SEQ ID NO: 289 - DNA, 2187 bp, Non-human primate Adeno-associated virus
atggctgccgatggttatcttccagattggctcgaggacaacctctctgagggcattcgcgagtggtgggacttgaaacctggagccccgaaacccaaagccaaccagcaaaagcaggacgacggccggggtctggtgcttcctggctacaagtacctcggacccttcaacggactcgacaagggagagccggtcaacgaggcagacgccgcggccctcgagcacgacaaggcctacgacaagcagctcgagcagggggacaacccgtacctcaagtacaaccacgccgacgccgagtttcaggagcgtcttcaagaagatacgtcttttgggggcaacctcgggcgagcagtcttccaggccaagaagcgggttctcgaacctctcggtctggttgaggaaggcgctaagacggcttccggaaagaagagacccatagaatcccccgactcctccacgggcatcggcaagaaaggccagcagcccgctaaaaagaagctcaactttgggcagactggcgactcagagtcagtgcccgacccccaacctctcggagaacctcccgccgcgccctcaggtctgggatctggtacaatggctgcaggcggtggcgcaccaatggcagacaataacgaaggcgccgacggagtgggtaatgcctccggaaattggcattgcgattccacatggctgggcgacagagtcatcaccaccagcacccgcacctgggccctgcccacctacaacaaccacctctacaagcagatatcaagtcagagcggggctaccaacgacaaccacttcttcggctacagcaccccctggggctattttgacttcaacagattccactgccacttctcaccacgtgactggcagcgactcatcaacaacaactggggattccggcccagaaagctgcggttcaagttgttcaacatccaggtcaaggaggtcacgacgaacgacggcgttacgaccatcgctaataaccttaccagcacgattcaggtcttctcggactcggagtaccaactgccgtacgtcctcggctctgcgcaccagggctgcctccctccgttccctgcggacgtgttcatgattcctcagtacggatatctgactctaaacaacggcagtcagtctgtgggacgttcctccttctgctgcctggagtactttccttctcagatgctgagaacgggcaataactttgaattcagctacacctttgaggaagtgcctttccacagcagctatgcgcacagccagagcctggaccggctgatgaatcccctcatcgaccagtacctgtactacctggcccggacccagagcactacggggtccacaagggagctgcagttccatcaggctgggcccaacaccgtggccgagcaatcaaagaactggctgcccggaccctgttatcggcagcagagactgtcaaaaaacatagacagcaacaacaacagtaactttgcctggaccggggccactaaataccatctgaatggtagaaattcattaaccaacccgggcgtagccatggccaccaacaaggacgacgaggaccagttccttcccatcaacggagtgctggtttttggcaaaacgggggctgccaacaagacaacgctggaaaacgtgctaatgaccagcgaggaggagatcaaaaccaccaatcccgtggctacagaagaatacggtgtggtctccagcaacctgcaatcgtctacggccggaccccggacacagactgtcaacagccagggggctctgcccggcatggtctggcagaaccgggacgtgtacctgcagggtcccatctgggccgaaattcctcacacggacggcaactttcacccgtctcccctgatgggcggatttggactcaaacacccgcctcctcaaattctcatcaaaaacaccccggtacctgctaatcctccagaggtgtttactcctgccaagtttgcctcatttatcacgcagtacagcaccggccaggtcagcgtggagatcgagtgggaactgcagaaagaaaacagcaaacgctggaatccagagattcagtacacctcaaattatgccaagtctaataatgtggaatttgctgtcaacaacgaaggggtttatactgagcctcgccccattggcacccgttacctcacccgtaacctgtaa

SEQ ID NO: 290 - DNA, 2187 bp, Non-human primate Adeno-associated virus
atggctgccgatggttatcttccagattggctcgaggacaacctctctgagggcattcgcgagtggtgggacttgaaacctggagccccgaaacccaaagccaaccagcaaaagcaggacgacggccggggtctggtgcttcctggctacaagtacctcagacccttcaacggactcgacaagggagagccggtcaacgaggcagacgccgcggccctcgagcacgacaaggcctacgacaagcagctcgagcagggggacaacccgtacctcaagtacaaccacgccgacgccgagtttcaggagcgtcttcaagaagatacgtcttttgggggcaacctcgggcgagcagtcttccaggccaagaagcgggttctcgaacctctcggtctggttgaggaagtcgctaagacggctcctggaaagaagagacccatagaatcccccgactcctccacgggcatcggcaagaaaggccagcagcccgctaaaaagaagctcaactttgggcagactggcgactcagagtcagtgcccgacccccaacctctcggagaacctcccgccgcgccctcaggtctgggatctggtacaatggctgcaggcggtggcgcaccaatggcagacaataacgaaggcgccgacggagtgggtaatgcctccggaaattggcattgcgattccacatggctgggcgacagagtcatcaccaccagcacccgcacctgggccctgcccacctacaacaaccacctctacaagcagatatcaagtcagagcggggctaccaacgacaaccacttcttcagctacagcaccccctggggctattttgacttcaacagattccactgccacttctcaccacgtgactggcagcgactcatcaacaacaactggggattccggcccagaaagctgcggttcaagttgttcaacatccaggtcaaggaggtcacgacgaacgacggcgttacgaccatcgctaataaccttaccagcacgattcaggtcttctcggactcggagtaccaactgccgtacgtcctcggctctgcgcaccagggctgcctccctccgttccctgcggacgtgttcatgattcctcagtacggatatctgactctaaacaacggcagtcagtctgtgggacgttcctccttctactgcctggagtactttccttctcagatgctgagaacgggcaataactttgaattcagctacacctttgaggaagtgcctttccacagcagctatgtgcacagccagagcctagaccggctgatgaatcccctcatcgaccagtacctgtactacctggcccggacccagagcactacggggtccacaagggagctgcagttccatcaggctgggcccaacaccatggccgagcaatcaaagaactggctgcccggaccctgttatcggcagcagagactgtcaaaaaacatagacagcaacaacaacagtaactttgcctggaccggggccactaaataccatctgaatggtagaaattcattaaccaacccgggcgtagccatggccaccaacaaggacgacgaggaccagttctttcccatcaacggagtgctggtttttggcaaaacgggggctgccaacaagacaacgctggaaaacgtgctaatgaccagcgaggaggagatcaaaaccaccaatcccgtggctacagaagaatacggtgtggtctccagcaacctgcaatcgtctacggccggaccccagacacagactgtcaacagccagggggctctgcccggcatggtctggcagaaccgggacgtgtgcctgcagggtcccatctgggccaaaattcctcacacggacggcaactttcacccgtctcccctgatgggcggatttggactcaaacacccgcctcctcaaattctcatcaaaaacaccccggtacctgctaatcctccagaggtgtttactcctgccaagtttgcctcatttatcacgcagtacagcaccggccaggtcagcgtggagatcgagtgggaactgcagaaagaaaacagcaaacgctggaatccagagattcagtacacctcaaattatgccaagtctaataatgtggaatttgctgtcaacaacgaaggggtttatactgagcctcgccccattggcacccgttacctcacccgtaacctgtaa

SEQ ID NO: 291 - DNA, 2214 bp, Non-human primate Adeno-associated virus
atggctgccgatggttatcttccagattggctcgaggacaacctctctgagggcattcgcgagtggtgggacctgaaacctggagccccgaaacccaaagccaaccagcaaaagcaggacaacggccggggtctggtgcttcctggctacaagtacctcggacccttcaacggactcgacaagggggagcccgtcaacgcggcggacgcagcggccctcgagcacgacaaggcctacgaccagcagctcaatgcgggtgacaacccgtacctgcggtataaccacgccgacgccgagtttcaggagcgtctgcaagaagatacgtcatttgggggcaacctcgggcgagcagtcttccaggccaagaagcgggttctcgaacctctcggtctggttgaggaaggcgctaagacggctcctgcaaagaagagaccggtagagccgtcacctcagcgttcccccgactcctccacgggcatcggcaagaagggccagcagcccgccagaaagagactcaatttcggtcagactggcgactcagagtcagtccccgaccctcaacctctcggagaacctccagcagcgccctctagtgtgggatctggtacagtggctgcaggcggtggcgcaccaatggcagacaataacgaaggtgccgacggagtgggtaatgcctcaggaaattggcattgcgattccacatggctgggcgacagagtcattaccaccagcacccgaacctgggccctgcccacctacaacaaccacctctacgagcaaatctccagtgaaactgcaggtagtaccaacgacaacacctacttcggctacagcaccccctgggggtattttgactttaacagattccactgccacttctcaccacgtgactggcagcgactcatcaacaacaactggggattccggcccaagaagctgcggttcaagctcttcaacatccaggtcaaggaggtcacgacgaatgacggcgttacgaccatcgctaataaccttaccagcacgattcaggtattctcggactcggaataccagctgccgtacgtcctcggctctgcgcaccagggctgcctgcctccgttcccggcggacgtcttcatgattcctcagtacggctacctgactctcaacaatggcagtcagtctgtgggacgttcctccttctactgcctggagtacttcccctctcagatgctgagaacgggcaacaactttgagttcagctacagcttcgaggacgtgcctttccacagcagctacgcacacagccagagcctggaccggctgatgaatcccctcatcgaccagtacttgtactacctggccagaacacagagtgacccaggaggcacagctggcaatcgggaactgcagttttaccagggcgggccttcaactatggccgaacaagccaagaattggttacctggaccctgcttccggcaacaaagggtctccaaaacgctggatcaaaacaacaacagcaactttgcttggactggtgccaccaaatatcacctgaacggcagaaactcgttggttaatcccggcgtcgccatggcaactcacaaggacgacgaggaccgctttttcccatccagcggagtcctgatttttggaaaaactggagcaactaacaaaactacattggaaaatgtgttaatgacaaatgaagaagaaattcgtcctactaatcctgtagccacggaagaatacgggatagtcagcagcaacttacaagcggctaatactgcagcccagacacaagttgtcaacaaccagggagccttacctggcatggtctggcagaaccgggacgtgtacctgcagggtcccatctgggccaagattcctcacacggatggcaactttcacccgtctcctttgatgggcggctttggacttaaacatccgcctcctcagatcctgatcaagaacactcccgttcccgctaatcctccggaggtgtttactcctgccaagtttgcttcgttcatcacacagtacagcaccggacaagtcagcgtggaaatcgagtgggagctgcagaaggaaaacagcaagcgctgggacccggagattcagtacacctccaactttgaaaagcagactggtgtggactttgccgttgacagccagggtgtttactctgagcctcgccctattggcactcgttacctcacccgtaatctgtaa

SEQ ID NO: 292 - DNA, 2208 bp, Non-human primate Adeno-associated virus
atggctgccgatggttatcttccagattggctcgaggacactctctctgaaggaatcagacagtggtggaagctcaaacctggcccaccaccgccgaaacctaaccaacaacaccgggacgacagtaggggtcttgtgcttcctgggtacaagtacctcggacccttcaacggactcgacaaaggagagccggtcaacgaggcagacgccgcggccctcgagcacgacaaagcctacgaccaccagctcaagcaaggggacaacccgtacctcaaatacaaccacgcggacgctgaatttcaggagcgtcttcaagaagatacgtctttcgggggcaacctcgggcgagcagtcttccaggccaaaaagagggtactcgagcctcttggtctggttgaggaagctgttaagacggctcctggaaaaaagagacctatagagcagtctcctgcagaaccggactcttcctcgggcatcggcaaatcaggccagcagcccgctaagaaaagactcaattttggtcagactggcgacacagagtcagtcccagaccctcaaccaatcggagaaccccccgcagccccctctggtgtgggatctaatacaatggcttcaggcggtggggcaccaatggcagacaataacgaaggcgccgacggagtgggtaattcctcgggaaattggcattgcgattccacatggatgggcgacagagttatcaccaccagcacaagaacctgggccctccccacctacaataatcacctctacaagcaaatctccagcgaatcgggagccaccaacgacaaccactacttcggctacagcaccccctgggggtattttgactttaacagattccactgtcacttctcaccacgtgactggcagcgactcatcaacaacaactggggatttagacccaagaaactcaatttcaagctcttcaacatccaagtcaaggaggtcacgcagaatgatggaaccacgaccatcgccaataaccttaccagcacggtgcaggtcttcacagactctgagtaccagctgccctacgtcctcggttcggctcaccagggctgccttccgccgttcccagcagacgtcttcatgattcctcagtacggctacttgactctgaacaatggcagccaagcggtaggacgttcttcattctactgtctagagtattttccctctcagatgctgaggacgggaaacaacttcaccttcagctacacttttgaagacgtgcctttccacagcagctacgcgcacagccagagtctggatcggctgatgaatcctctcattgaccagtacctgtattacctgagcaaaactcagggtacaagtggaacaacgcagcaatcgagactgcagttcagccaagctgggcctagctccatggctcagcaggccaaaaactggctaccgggacccagctaccgacagcagcgaatgtctaagacggctaatgacaacaacaacagtgaatttgcttggactgcagccaccaaatattacctgaatggaagaaattctctggtcaatcccgggcccccaatggccagtcacaaggacgatgaggaaaagtatttccccatgcacggaaatctcatctttggaaaacaaggcacaggaactaccaatgtggacattgaatcagtgcttattacagacgaagaagaaatcagaacaactaatcctgtggctacagaacaatacggacaggttgccaccaaccatcagagtcagaacaccacagcttcctatggaagtgtggacagccagggaatcttacctggaatggtgtggcaggaccgcgatgtctatcttcaaggtcccatttgggccaaaactcctcacacggacggacactttcatccttctccgctcatgggaggctttggactgaaacaccctcctccccagatcctgatcaaaaacacacctgtgccagcgaatcccgcgaccactttcactcctggaaagtttgcttcgttcattacccagtattccaccggacaggtcagcgtggaaatagagtgggagctgcagaaagaaaacagcaaacgctggaacccagaaattcagtacacctccaactacaacaagtcggtgaatgtggagtttaccgtggacgcaaacggtgtttattctgaaccccgccctattggcactcgttaccttacccggaacttgtaa

SEQ ID NO: 293 - DNA, 2217 bp, Non-human primate Adeno-associated virus
atggctgccgatggttatcttccagattggctcgaggacaacctctctgagggcattcgcgagtggtgggcgctgaaacctggagccccgaagcccaaagccaaccagcaaaagcaggacgacggccggggtctggtgcttcctggctacaagtacctcggacccttcaacggactcgacaagggggagcccgtcaacgcggcggacgcagcggccctcgagcacgacaaggcctacgaccagcagctcaaagcgggtgacaatccgtacctgcggtataaccacgccgacgccgagtttcaggagcgtctgcaagaagatacgtcttttgggggcaacctcgggcgagcagtcttccaggccaagaagcgggttctcgaacctctcggtctggttgaggaaggcgctaagacggctcctggaaagaagagaccggtagagccatcaccccagcgttctccagactcctctacgggcatcggcaagaaaggccagcagcccgcgaaaaagagactcaactttgggcagactggcgactcagagtcagtgcccgaccctcaaccaatcggagaaccccccgcaggcccctctggtctgggatctggtacaatggctgcaggcggtggcgctccaatggcagacaataacgaaggcgccgacggagtgggtagttcctcaggaaattggcattgcgattccacatggctgggcgacggagtcatcaccaccagcacccgaacctgggccctccccacctacaacaaccacctctacaagcaaatctccaacgggacttcgggaggaagcaccaacgacaacacctacttcggctacagcaccccctgggggtattttgactttaacagattccactgccacttctcaccacgtgactggcagcgactcatcaacaacaactggggattccggcccaagagcctcaacttcaagctcttcaacatccaggtcaaggaggtcacgcagaatgaaggcaccaagaccatcgccaataaccttaccagcacgattcaggtctttacggactcggaataccagctcccgtacgtcctcggctctgcgcaccagggctgcctgcctccgttcccggcggacgtcttcatgattcctcagtacgggtacctgactctgaacaatggcagtcaggccgtgggccgttcctccttctactgcctggagtactttccttctcaaatgctgagaacgggcaacaactttgagttcagctaccagtttgaggacgtgccttttcacagcagctacgcgcacagccaaagcctggaccggctgatgaaccccctcatcgaccagtacctgtactacctgtctcggactcagtccacgggaggtaccgcaggaactcagcagttgctattttctcaggccgggcctaataacatgtcggctcaggccaaaaactggctacccgggccctgctaccggcagcaacgcgtctccacgacactgtcgcaaaatgacaacagcaactttgcctggaccggtgccaccaagtatcatctgaatggcagagactctctggtaaatcccggtgtcgctatggcaacccacaaggacgacgaagagcgattttttccgtccagcggagtcttaatgtttgggaaacagggagctggaaaagacaacgtggactatagcagcgttatgctaaccagtgaggaagaaattaaaaccaccaacccagtggccacagaacagtacggcgtggtggccgataacctgcaacagcaaaacgccgctcctattgtaggggccgtcaacagtcaaggagccttacctggcatggtctggcagaaccgggacgtgtacctgcagggtcctatctgggccaagattcctcacacggacggaaactttcatccctcgccgctgatgggaggctttggactgaaacacccgcctcctcagatcctgattaagaatacacctgttcccgcggatcctccaactaccttcagtcaagctaagctggcgtcgttcatcacgcagtacagcaccggacaggtcagcgtggaaattgaatgggagctgcagaaagaaaacagcaaacgctggaacccagagattcaatacacttccaactactacaaatctacaaatgtggactttgctgttaacacagatggcacttattctgagcctcgccccatcggcacccgttacctcacccgtaatctgtaa

SEQ ID NO: 294 - DNA, 2217 bp, Non-human primate Adeno-associated virus
atggctgccgatggttatcttccagattggctcgaggacaacctctctgagggcattcgcgagtggtgggcgctgaaacctggagccccgaagcccaaagccaaccagcaaaagcaggacgacggccggggtctggtgcttcctggctacaagtacctcggacccttcaacggactcgacaagggggagcccgtcaacgcggcggacgcagcggccctcgagcacgacaaggcctacgaccagcagctcaaagcgggtgacaatccgtacctgcggtataaccacgccgacgccgagtttcaggagcgtctgcaagaagatacgtcttttgggggcaacctcggacgagcagtcttccaggccaagaagcgggttctcgaacctctcggtctggttgaggaaggcgctaagacggctcctggaaagaagagaccggtagagccatcaccccagcgttctccagactccactacgggcatcggcaagaaaggccagcagcccgcgaaaaagagactcaactttgggcagactggcgactcagagtcagtgcccgaccctcaaccaatcggagaaccccccgcaggcccctctggtctgggatctggtacaatggctgcaggcggtggcgctccaatggcagacaataacgaaggcgccgacggagtgggtagttcctcaggaaattggcattgcgattccacatggctgggcgacagagtcatcaccaccagcacccgaacctgggccctccccacctacaacaaccacctctacaagcaaatctccaacgggacttcgggaggaagcaccaacgacaacacctacttcggctacagcaccccctgggggtattttgactttaacagattccactgccacttctcaccacgtgactggcagcgactcatcaacaacaactggggattccggcccaagagactcaacttcaagctcttcaacatccaggtcaaggaggtcacgcagaatgaaggcaccaagaccatcgccaataaccttaccagcacgattcaggtctttacggactcggaataccagctcccgtacgtcctcggctctgcgcgccagggctgcctgcctccgttcccggcggacgtcttcatgattcctcagtacgggtacctgactctgaacaatggcagtcaggccgtgggccgttcctccttctactgcctggagtactttccttctcaaatgctgagaacgggcaacaactttgagttcagctaccagtttgaggacgtgccttttcacagcagctacgcgcacagccaaagcctggaccggctgatgaaccccctcatcgaccagtacctgtactacctgtctcggactcagtccacgggaggtaccgcaggaactcagcagttgctattttctcaggccgggcctaataacatgtcggctcaggccaaaaactggctacccgggccctgctaccggcagcaacgcgtctccacgacactgtcgcaaaataacaacagcaactttgcctggaccggtgccaccaagtatcatctgaatggcagagactctctggtaaatcccggtgtcgctatggcaacccacaaggacgacgaagagcgattttttccgtccagcggagtcttaatgtttgggaaacagggagctggaaaaggcaacgtggactatagcagcgttatgctaaccagtgaggaagaaattaaaaccaccaacccagtggccacagaacagtacggcgtggtggccgataacctgcaacagcaaaacgccgctcctattgtaggggccgtcaacagtcaaggagccttacctggcatggtctggcagaaccgggacgtgtacctgcagggtcctatctgggccaagattcctcacacggacggaaactttcatccctcgccgctgatggggggctttggactgaaacacccgcctcctcagatcctgattaagaatacacctgttcccgcggatcctccaactaccttcagtcaagctaagctggcgtcgttcatcacgcagtacagcaccggacaggtcagcgtggaaattgaatgggagctgcagaaagaaaacagcaaacgctggaacccagagattcaatacacttccaactactacaaatctacaaatgtggactttgctgttaacacagatggcacttattctgagcctcgccccatcggcacccgttacctcacccgtaatctgtaa

SEQ ID NO: 295 - DNA, 1932 bp, Non-human primate Adeno-associated virus
  modified_base (1301)..(1301): a, c, t, g, unknown or other
aaggcctacgaccagcagctcaaagcgggtgacaatccgtacctgcggtataaccacgccgacgccgagtttcaggagcgtcttcaagaagatacgtcttttgggggcaacctcgggcgagcagtcttccaggccaaaaagcgggttctcgaacctcttggtctggttgagacgccagctaagacggcacctggaaagaagcgaccggtagactcgccagactccacctcgggcatcggcaagaaaggccagcagcccgcgaaaaagagactcaactttgggcagactggcgactcagagtcagtccccgaccctcaaccaatcggagaaccaccagcaggcccctctggtctgggatctggtacaatggctgcaggcggtggcgcaccaatggctgacaataacgagggcgccgacggagtgggtaatgcctcaggaaattggcattgcgattccacatggctgggcgacagagtcatcaccaccagcacccgaacctgggccctgcccacctacaacaaccacctctacaagcaaatctccagtcagtcagcagggagcaccaacgataacgtctatttcggctacagcaccccctgggggtattttgacttcaacagattccattgccacttctcaccacgtgactggcagcgacttatcaacaacaactggggattccggcccaagaagctcaacttcaagctcttcaacatccaggtcaaggaggtcacgacgaatgacggtgtcacaaccatcgctaataaccttaccagcacggttcaggtcttttcggactcggaatatcaactgccgtacgtcctcggctccgcgcaccagggctgcctgcctccgttcccggcagacgtgttcatgattccgcagtacggatacctgactctgaacaatggcagccaatcggtaggccgttcctccttctactgcctggagtactttccttctcagatgctgagaacgggcaacaacttcacctttagctacaccttcgaggacgtgcctttccacagcagctacgcgcacagccagagtctggaccggctgatgaatcccctcatcgaccagtacctgtactacttggccagaacacagagcaacgcaggaggtactgctggcaatcgggaactgcagttttatcagggcggacctaccaccatggccgaacaagcaaagaactggctgcccggaccttgcttccggcaacagagagtatccaagacgctggatcaaaataacaacagcaactttgcctggactggtgccacaaaataccatttaaatgnaagaaattcattggttaatcccggtgtcgccatggcaacccacaaggacgacgaggaacgcttcttcccttcgagcggagttctaatttttggcaaaactggagcagctaataaaactacattagaaaacgtgctcatgacaaatgaagaagaaattcgtcctaccaacccggtagctaccgaggaatacgggattgtaagcagcaacttgcaggcggctagcaccgcagcccagacacaagttgttaacaaccagggagccttacctggcatggtctggcagaaccgggacgtgtacctgcaaggtcccatttgggccaagattcctcacacggacggcaactttcacccgtctcctctaatgggtggctttggactgaaacacccgcctccccagatcctgatcaaaaacacaccggtacctgctaatcctccagaagtgtttactcctgccaagtttgcttccttcatcacgcagtacagcaccgggcaagtcagcgttgagatcgagtgggagctgcagaaagagaacagcaagcgctggaacccagagattcagtacacctccaactttgacaaacagactggagtggactttgctgttgacagccagggtgtttactctgagcct

SEQ ID NO: 296 - DNA, 1932 bp, Non-human primate Adeno-associated virus
aaggcctacgaccagcagctcaaagcgggtgacaatccgtacctgcggtataaccacgccgacgccgagtttcaggagtgtcttcaagaagatacgtcttttgggggcaacctcgggcgagcagtcttccaggccaaaaagcgggttctcgaacctcttggtctggttgagacgccagctaagacggcacctggaaagaagcgaccggtagactcgccagactccacctcgggcatcggcaagaaaggccagcagcccgcgaaaaagagactcaactttgggcagactggcgactcagagtcagtccccgaccctcaaccaatcggagaaccaccagcaggcccctctggtctgggatctggtacaatggttgcaggcggtggcgcaccaatggctgacaataacgagggcgccgacggagtgggtaatgcctcaggaaattggcattgcgattccacatggctgggcgacagagtcatcaccaccagcacccgaacctgggccctgcccacctacaacaaccacctctacaagcaaatctccagtcagtcagcagggagcaccaacgataacgtctatttcggctacagcaccccctgggggtattttgacttcaacagattccattgccacttctcaccacgtgactggcagcgacttatcaacaacaactggggattccggcccaagaagctcaacttcaagctcttcaacatccaggtcaaggaggtcacgacgaatgacggtgtcacaaccatcgctaataaccttaccagcacggttcaggtcttttcggactcggaatatcaactgccgtacgtcctcggctccgcgcaccagggctgcctgcctccgttcccggcagacgtgttcatgattccgcagtacggatacctgactctgaacaatggcagccaatcggtaggccgttcctccttctactgcctggagtactttccttctcagatgctgagaacgggcaacaacttcacctttagctacaccttcgaggacgtgcctttccacagcagctacgcgcacagccagagtctggaccggctgatgaatcccctcatcgaccagtacctgtactacttggccagaacacagagcaacgcaggaggtactgctggcaatcgggaactgcagttttatcagggcggacctaccaccatggccgaacaagcaaagaactggctgcccggaccttgcttccggcaacagagagtatccaagacgctggatcaaaataacaacagcaactttgcctggactggtgccacaaaataccatttaaatggaagaaattcattggttaatcccggtgtcgccatggcaacccacaaggacgacgaggaacgcttctccccttcgagcggagttctaatttttggcaaaactggagcagctaataaaactacattagaaaacgtgctcatgacaaatgaagaagaaattcgtcctaccaacccggtagctaccgaggaatacgggattgtaagcagcaacttgcaggcggctagcaccgcagcccagacacaagttgttaacaaccagggagccttacctggcatggtctggcagaaccgggacgtgtacctgcaaggtcccatttgggccaagattcctcacacggacggcaactttcacccgtctcctctaatgggtggctttggactgaaacacccgcctccccagatcctgatcaaaaacacgccggtacctgctaatcctccagaagtgtttactcctgccaagtttgcttccttcatcacgcagtacagcaccgggcaagtcagcgttgagatcgagtgggagctgcagaaagagaacagcaagcgctggaacccagagattcagtacacctccaactttgacaaacagactggagtggactttgctgttgacagccagggtgtttactctgagcct

SEQ ID NO: 297 - DNA, 1932 bp, Non-human primate Adeno-associated virus
aaggcctacgaccagcagctcaaagcgggtgacaatccgtacctgcggtataaccacgccgacgccgagtttcaggagcgtcttcaagaagatacgtcttttgggggcaacctcgggcgagcagtcttccaggccaaaaagcgggttctcgaacctcttggtctggttgagacgccagctaagacggcacctggaaagaagcgaccggtagactcgccagactccacctcgggcatcggcaagaaaggccagcagcccgcgaaaaagagactcaactttgggcagactggcgactcagagccagtccccgaccctcaaccaatcggagaaccaccagcaggcccctctggtctgggatctggtacaatggctgcaggcggtggcgcaccaatggctgacaataacgagggcgccgacggagtgggtaatgcctcaggaaattggcattgcgattccacacggctgggcgacagagtcatcaccaccagcacccgaacctgggccctgcccacctacaacaaccacctctacaagcaaatctccagtcagtcagcagggagcaccaacgataacgtctatttcggctacagcaccccctgggggtattttgacttcaacagattccattgccacttctcaccacgtgactggcagcgacttatcaacaacaactggggattccggcccaagaagctcaacttcaagctcttcaacatccaggtcaaggaggtcacgacgaatgacggcgtcacaaccatcgctaataaccttaccagcacggttcaggtcttttcggactcggaatatcaactgccgtacgtcctcggctccgcgcaccagggctgcctgcctccgttcccggcagacgtgttcatgattccgcagtacggatacctgactctgaacaatggcagccaatcggtaggccgttcctccttctactgcctggagtactttccttctcagatgctgagaacgggcaacaacttcacctttagctacaccttcgaggacgtgcctttccacagcagctacgcgcacagccagagtctgggccggctgatgaatcccctcatcgaccagtacctgtactacttggccagaacacagagcaacgcaggaggtactgctggcaatcgggaactgcagttttatcagggcggacctaccaccatggccgaacaagcaaagaactggctgcccggaccttgcttccggcaacagagagtatccaagacgctggatcaaaataacaacagcaactttgcctggactggtgccacaaaataccatttaaatggaagaaattcattggttaatcccggtgtcgccatggcaacccacaaggacgacgaggaacgcttcttcccttcgagcggagttctaatttttggcaaaactggagcagctaataaaactacattagaaaacgtgctcatgacaaatgaagaagaaattcgtcctaccaacccggtagctaccgaggaatacgggattgtaagcagcaacttgcaggcggctagcaccgcagcccagacacaagttgttaacaaccagggagccttacctggcatggtctggcagaaccgggacgtgtacctgcaaggtcccatttgggccaagattcctcacacggacggcaactttcacccgtctcctctaatgggtggctttggactgaaacacccgcctccccagatcctgatcaaaaacacaccggtacctgctaatcctccagaagtgtttactcctgccaagtttgcttccttcatcacgcagtacagcaccgggcaagtcagcgttgagatcgaatgggagctgcagaaagagaacagcaagcgctggaacccagagattcagtacacctccaactttgacaaacagactggagtggactttgctgttgacagccagggtgtttactctgagcct

SEQ ID NO: 298 - DNA, 2538 bp, Non-human primate Adeno-associated virus
caggtgcctgtgccccacgtgttcagcgtcccgacatgttccgcggcggccgttcaaaagcgcccgacctcgcccagtccgccatttcacggcgagacagcgagggacgcggatcggaagacgcgcaagaagcccaggtatgatcgccctaaaccggaaccagcgaaagaccagaactgtctggacaagtggctcgaggagtctcccccgccgagaccctcggtagtccacgacctccaggactctggggacactgtgttcgattttcgggtggtgcgggaggtggagtgccccgattctaataaagagcaataaaatgattgatttgtagccatgtcttttttcgattggataggtcgtaagtacgccaacggcgccgctgagttctgggatctcgagccgggtcctccgaagcccaaaaaggccagagtcgacgactcggccggcttcaacttccccgggcacaagtacttgggccccggcaacggtctcgaccgaggggagcccgtggatgccgacgacgcggcggcccagaaacacgaccaggaatatcaggctctgcttgagagcggtgagaatccttacctcacttttaatcacgctgatcggcagctgcagaaggacctcgcggaggaccaatctttcgaggggaacctcgcccggggtctgttcgaagccaagaagctcgcggcacaggtcgtaggcgtcgaggagccggagctggctcctccagtcaagcgtccacactcgcccgagaaaaccccagagaaccagaagggtcagccgcgaccggatccccggacgccggccaagaagaggctcgagttctccgatcagcctggatcttcagcagacttacctgcatcctcacaacagtcccagcctcccgcaggggttcccggtgtggttcctggtacgatgtctgcaggaggaggcgctccagtggacgatgctcaacaaggtgccgacggagtgggcaatgcctcgggagattggcattgcgattccaaatggctgggcaaccgagttctcacccgatccacccggacctgggtgctgcccagctacaacaaccacctgtacaagcagatctcagacgcctccggcgtgcacagcctccccgggagccgatactttggctacagcaccccctgggggtacttcgacttcaatcgcttccactgccacttctcgcccagagactggcagcgcctcgtcaataaccactggggcttccgacccaagagactgcgagtcaaactcttcaacatccaggtcaaggaggtcacgactactgattcgacgaccacggtctccaacaacctcacgagcacggtccaggtcttcacagacgacgagtaccagctgccgtacgtctgcggcaacgccaccgagggatgcctgccgccgttccccccggacgtcttcacgctgccgcagtacggctacgcgacgctgaacgacagcaacaatggcaaccccaccaacagatcgagcttcttctgtctggaatactttcccagcaagatgctgagaaccgggaacaactttgaatttaccttcgagtttgaagacgtgcccttccacacgggcttcgccccctgtcagaacctgttcaagctgagcaatcccctggtggaccagtacctgtaccgcttccagggtactgacaactcctccagcagcacgcccggggtggtcaagttcgagaaatgcgtggcccacaactacgcccagcagtacaagaactggctgaccggtgctttccagaggaaccaggactataactacgtgtctggtactagcaactacaagggcgtggttggatctaatcagaataacctgcagcgcatagagaatgtgcagttcgccattgctccggacgtgcccagcatgtgtaaccatctggagggcaccaatatgatcgctctggacaacagcctgatcttccgggatgtctctaccgcccctggtgacacgactcagtataacatcaaccaggtgatcgtgaccagcgaagccgagactcaatctgtcaatgcgtactcgggcgacacctgtggccgcattgtgaataacagccagaatagcggaaccaacgctgggaccaccggcatcaactacaaaggtaccatgccgtcctcggtctggatggaccgtgacgtctacctgcagggcccgatctgggccaagattccccacacgggggcgcactttcacccgtctcccatgatggggggcttcggcctgaggaaccctcctccgatgatgctgatcaagaacacgcccgttcctggcaacgtgaccaccttcaccgaggtcaaggttaaccagttcatcacccagtactcgaccgggcagatcaccgtggacgtggaatgggagctgcagaaggagaactccaaacgatggaaccccgagatccagtacacaaataactacagtaataatacttttgtggactttgcccccaatgctaatggagattaccagatgacccgccccattggaacccgctacccgacccgccccccgtaa

SEQ ID NO: 299 - DNA, 2211 bp, Rat adeno-associated virus
atggctgctgacggttatcttccagattggctcgaggacaacctttctgaaggcattcgagagtggtgggcgctgcaacctggagcccctaaacccaaggcaaatcaacaacatcaggacaacgctcggggtcttgtgcttccgggttacaaatacctcggacccggcaacggactcgacaagggggaacccgtcaacgcagcggacgcggcagccctcgagcacgacaaggcctacgaccagcagctcaaggccggtgacaacccctacctcaagtacaaccacgccgacgccgagttccaggagcggctcaaagaagatacgtcttttgggggcaacctcgggcgagcagtcttccaggccaaaaagaggcttcttgaacctcttggtctggttgaggaagcggctaagacggctcctggaaagaagaggcctgtagatcagtctcctcaggaaccggactcatcatctggtgttggcaaatcgggcaaacagcctgccagaaaaagactaaatttcggtcagactggcgactcagagtcagtcccagaccctcaacctctcggagaaccaccagcagcccccacaagtttgggatctaatacaatggcttcaggcggtggcgcaccaatggcagacaataacgagggtgccgatggagtgggtaattcctcaggaaattggcattgcgattcccaatggctgggcgacagagtcatcaccaccagcaccagaacctgggccctgcccacttacaacaaccatctctacaagcaaatctcctgccaatcaggagcttcaaacgacaaccactactttggctacagcaccccttgggggtattttgactttaacagattccactgccacttctcaccacgtgactggcagcgactcattaacaacaactggggattccggcccaagaaactcagcttcaagctcttcaacatccaagttaaagaggtcacgcagaacgatggcacgacgactattgccaataaccttaccagcacggttcaagtgtttacggactcggagtatcagctcccgtacgtgctcgggtcggcgcaccaaggctgtctcccgccgtttccagcggacgtcttcatggtccctcagtatggatacctcaccctgaacaacggaagtcaagcggtgggacgctcatccttttactgcctggagtacttcccttcgcagatgctaaggactggaaataacttccaattcagctataccttcgaggatgtaccttttcacagcagctacgctcacagccagagtttggatcgcttgatgaatcctcttattgatcagtatctgtactacctgaacagaacgcaaggaacaacctctggaacaaccaaccaatcacggctgctttttagccaggctgggcctcagtctatgtctttgcaggccagaaattggctacctgggccctgctaccggcaacagagactttcaaagactgctaacgacaacaacaacagtaactttccttggacagcggccagcaaatatcatctcaatggccgcgactcgctggtgaatccaggaccagctatggccagtcacaaggacgatgaagaaaaatttttccctatgcacggcaatctaatatttggcaaagaagggacaacggcaagtaacgcagaattagataatgtaatgattacggatgaagaagagattcgtaccaccaatcctgtggcaacagagcagtatggaactgtggcaaataacttgcagagctcaaatacagctcccacgactagaactgtcaatgatcagggggccttacctggcatggtgtggcaagatcgtgacgtgtaccttcaaggacctatctgggcaaagattcctcacacggatggacactttcatccttctcctctgatgggaggctttggactgaaacatccgcctcctcaaatcatgatcaaaaatactccggtaccggcaaatcctccgacgactttcagcccggccaagtttgcttcatttatcactcagtactccactggacaggtcagcgtggaaattgagtgggagctacagaaagaaaacagcaaacgttggaatccagagattcagtacacttccaactacaacaagtctgttaatgtggactttactgtagacactaatggtgtttatagtgaacctcgccccattggcacccgttaccttacccgtcccctgtaa

SEQ ID NO: 300 - protein, 736 aa, Artificial Sequence
  Description of Artificial Sequence: Synthetic polypeptide
MAADGYLPDWLEDNLSEGIREWWDLKPGAPKPKANQQKQDDGRGLVLPGYKYLGPFNGLDKGEPVNAADAAALEHDKAYDQQLKAGDNPYLRYNHADAEFQERLQEDTSFGGNLGRAVFQAKKRVLEPLGLVEEGAKTAPGKRRPVEQSPQEPDSSSGIGKTGQQPAKKRLNFGQTGDSESVPDPQPLGEPPATPAAVGPTTMASGGGAPMADNNEGADGVGNASGNWHCDSTWLGDRVITTSTRTWALPTYNNHLYKQISSASTGASNDNHYFGYSTPWGYFDFNRFHCHFSPRDWQRLINNNWGFRPKRLNFKLFNIQVKEVTTNDGVTTIANNLTSTVQVFSDSEYQLPYVLGSAHQGCLPPFPADVFMIPQYGYLTLNNGSQAVGRSSFYCLEYFPSQMLRTGNNFTFSYTFEEVPFHSSYAHSQSLDRLMNPLIDQYLYYLNRTQNQSGSAQNKDLLFSRGSPAGMSVQPKNWLPGPCYRQQRVSKTKTDNNNSNFTWTGASKYNLNGRESIINPGTAMASHKDDEDKFFPMSGVMIFGKESAGASNTALDNVMITDEEEIKATNPVATERFGTVAVNFQSSSTDPATGDVHAMGALPGMVWQDRDVYLQGPIWAKIPHTDGHFHPSPLMGGFGLKNPPPQILIKNTPVPANPPAEFSATKFASFITQYSTGQVSVEIEWELQKENSKRWNPEVQYTSNYAKSANVDFTVDNNGLYTEPRPIGTRYLTRPL

SEQ ID NO: 301 - protein, 736 aa, Artificial Sequence
  Description of Artificial Sequence: Synthetic polypeptide
MAADGYLPDWLEDNLSEGIREWWDLKPGAPKPKANQQKQDDGRGLVLPGYKYLGPFNGLDKGEPVNAADAAALEHDKAYDQQLKAGDNPYLRYNHADAEFQERLQEDTSFGGNLGRAVFQAKKRVLEPLGLVEEGAKTAPGKKRPVEQSPQEPDSSSGIGKTGQQPAKKRLNFGQTGDSESVPDPQPLGEPPATPAAVGPTTMASGGGAPMADNNEGVDGVGNASGNWHCDSTWLGDRVITTSTRTWALPTYNNHLYKQISSASTGASNDNHYFGYSTPWGYFDFNRFHCHFSPRDWQRLINNNWGFRPKRLNFKLFNIQVKEVTTNDGVTTIANNLTSTVQVFSDSEYQLPYVLGSAHQGCLPPFPADVFMIPQYGYLTLNNGSQAVGRSSFYCLEYFPSQMLRTGNNFTFSYTFEEVPFHSSYAHSQSLDRLMNPLIDQYLYYLNRTQNQSGSAQNKDLLFSRGSPAGMSVQPKNWLPGPCYRQQRVSKTKTDNNNSNFTWTGASKYNLNGRESIINPGTAMASHKDDEDKFFPMSGVMIFGKESAGASNTALDNVMITDEEEIKATNPVATERFGTVAVNFQSSSTDPATGDVHAMGALPGMVWQDRDVYLQGPIWAKIPHTDGHFHPSPLMGGFGLKNPPPQILIKNTPVPANPPAEFSATKLASFITQYSTGQVSVEIEWELQKENSKRWNPEVQYTSNYAKSANVDFTVDNNGLYTEPRPIGTRYLTRPL

SEQ ID NO: 302 - protein, 736 aa, Artificial Sequence
  Description of Artificial Sequence: Synthetic polypeptide
MAADGYLPDWLEDNLSEGIREWWDLKPGAPKPKANQQKQDDGRGLVLPGYKYLGPFNGLDKGEPVNAADAAALEHDKAYDQQLKAGDNPYPRYNHADAEFQERLQEDTSFGGNLGRAVFQAKKRVLEPLGLVGEGAKTAPGKKRPVEQSPQEPDSSSGIGKTGQQPAKKRLNFGQTGDSESVPDPQPLGEPPATPAAVGPTTMASGGGAPMADNNEGADGVGNASGNWHCDSTWLGDRVITTSTRTWALPTYNNHLYKQISSASTGASNDNHYFGYSTPWGYFDFNRFHCHFSPRDWQRLINNNWGFRPKRLNFKLFNIQVKEVTTNDGVTTIANNLTSTVQVFSDSEYQLPYVLGSAHQGCLPPFPADVFMIPQYGYLTLNNGSQAVGRSSFYCLEYFPSQMLRTGNNFTFSYTFEEVPFHSSYAHSQSLDRLMNPPIDQYLYYLNRTQNQSGSAQNKDLLFSRGSPAGMSVQPKNWLPGPCYRQQRVSKTKTDNNNSNFTWTGASKYNLNGRESIINPGTAMASHKDDEDKFFPMSGVMIFGKESAGASNTALDNVMITDEEEIKATNPVATERFGTVAVNFQSSSTDPATGDVHAMGALPGMVWQDRDVYLQGPIWAKIPHTDGHFHPSPLMGGFGLKNPPPQILIKNTPVPANPPAEFSATKFASFITQYSTGQVSVEIEWELQKENSKRWNPEVQYTSNYAKSANVDFTVDNNGLYTEPRPIGTRYLTRPL

SEQ ID NO: 303 - protein, 736 aa, Artificial Sequence
  Description of Artificial Sequence: Synthetic polypeptide
MAADGYLPDWLEDNLSEGIREWWDLKPGAPKPKANQQKQDDGRGLVLPGYKYLGPFNGLDKGEPVNAADAAALEHDKAYDQQLKAGDNPYLRYNHADAEFQERLQEDTSFGGNLGRAVFQAKKRVLEPLGLVEEGAKTAPGKKRPVEQSPQEPDSSSGIGKTGQQPAKKRLNFGQTGGSESVPDPQPLGEPPATPAAVGPTTMASGGGAPMADNNEGADGVGNASGNWHCDSTWLGDRVITTSTRTWALPTYNNHLYKQISSASTGASNDNHYFGYSTPWGYFDFNRFHCHFSPRDWQRLINNNWGFRPKRLNFKLFNIQVKEVTTNDGVTTIANNLTSTVQVFSDSEYQLPYVLGSAHQGCLPPFPADVFMIPQYGYLTLNNGSQAVGRSSFYCLEYFPSQMLRTGNNFTFSYTFEEVPFHSSYAHSQSLDRLMNPPIDQYLYYLNRTQNQSGSAQNKDLLFSRGSPAGMSVQPKNWLPGPCYRQQRVSKTKTDNNNSNFTWTGASKYNLNGRESIINPGTAMASHKDDEDKFFPMSGVMIFGKESAGASNTALDNVMITDEEEIKATNPVATERFGTVAVNFQSSSTDPATGDVHAMGALPGMVWQDRDVYLQGPIWAKIPHTDGHFHPSPLMGGFGLKNPPPQILIKNTPVPANPPAEFSATKFASFITQYSTGQVSVEIEWELQKENSKRWNPEVQYTSNYAKSANVDFTVDNNGLYTEPRPIGTRYLTRPL

SEQ ID NO: 304 - protein, 736 aa, Artificial Sequence
  Description of Artificial Sequence: Synthetic polypeptide
MAADGYLPDWLEDNLSEGIREWWDLKPGAPKPKANQQKQDDGRGLVLPGYKYLGPFNGLDKGEPVNAADAAALEHDKAYDQQLKAGDNPYLRYNHADAEFQERLQEDTSFGGNLGRAVFQAKKRVLEPLGLVEEGAKTAPGKKRPVEQSPQEPDSSSGIGKTGQQPAKKRLNFGQTGDSESVPDPQPLGEPPATPAAVGPTTMASGGGAPMADNNEGADGVGNASGNWHCDSTWLGDRVITTSTRTWALPTYNNHLYKQISSASTGASNDNHYFGYSTPWGYFDFNRFHCHFSPRDWQRLINNNWGFRPKRLNFKLFNIQVKEVTTNDGVTTIANNLTSTVQVFSDSEYQLPYVLGSAHQGCLPPFPADVFMIPQYGYLTLNNGSQAVGRSSFYCLEYFPSQMLRTGNNFTFSYTFEEVPFHSSYAHSQSLDRLMNPLIDQYLYYLNRTQNQSGSAQNKDLLFSRGSPAGMSVQPKNWLPGPCYRQQRVSKTKTDNNNSNFTWTGASKYNLNGRESIINPGTAVASHKDDEDKFFPMSGVMIFGKESAGASNTALDNVMITDEEEIKATNPVATERFGTVAVNFQSSSTDPATGDVHAMGALPGMVWQDRDVYLQGPIWAKIPHTDGHFHPSPLMGGFGLKNPPPQILIKNTPVPANPPAEFSATKFASFITQYSTGQVSVEIEWELQKENSKRWNPEVQYTSNYAKSANVDFTVDNNGLYTEPRPIGTRYLTRPL

SEQ ID NO: 305 - protein, 735 aa, Artificial Sequence
  Description of Artificial Sequence: Synthetic polypeptide
MAADGYLPDWLEDNLSEGIREWWDLKPGAPKPKANQQKQDDGRGLVLPGYKYLGPFNGLDKGEPVNAADAAALEHDKAYDQQLKAGDNPYLRYNHADAEFQERLQEDTSFGGNLGRAVFQAKKRVLEPLGLVEEGAKTAPGKKRPVEQSPQEPDSSSGIGKTGQQPAKKRLNFGQTGDSESVPDPQPLGEPPATPAAVGPTTMASGGGAPMADNNEGADGVGNASGNWHCDSTWLGDRVITTSTRTWALPTYNNHLYKQISSASTGASNDNHYFGYSTPWGYFDFNRFHCHFSPRDWQQLINNNWGFRPKRLNFKLFNIQVKEVTTNDGVTTIANNLTSTVQVFSDSEYQLPYVLGSAHQGCLPPFPADVFMIPQYGYLTLNNGSQAVGRSSFYCLEYFPSQMLRTGNNFTFSYTFEEVPFHSSYAHSQSLDRLMNPLIDQYLYYLNRTQNQSGSAQNKDLLFSRGSPAGMSVQPKNWLPGPCYRQQRVSKTKTDNNNSNFTWTGASKYNLNGRESIINPGTAMASHKDDEDKFFPMSGVMIFGKESAGASNTALDNVMITDEEEIKATNPVATERFGTVAVNFQSTSTDPATGDVHAMGALPGMVWQDRDVYLQGPIWAKIPHTDGHFHPSPLMGGFGLKNPPPQILIKNTPVPANPPAEFSATKFASFITYSTGQVSVEIEWELQKENSKRWNPEVQYTSNYAKSADVDFTVDNNGLYTEPRPIGTRYLTRPL

SEQ ID NO: 306 - protein, 736 aa, Artificial Sequence
  Description of Artificial Sequence: Synthetic polypeptide
MAADGYLPDWLEDNLSEGIREWWDLKPGAPKPKANQQKQDDGRGLVLPGYKYLGPFNGLDKGEPVNAADAAALEHDKAYDQQLKAGDNPYLRYNHADAEFQERLQEDTSFGGNLGRAVFQAKKRVLEPLGLVEEGAKTAPGKKRPVEQSPQEPDSSSGIGKTGQQPAKKRLNFGQTGDSESVPDPQPLGEPPATPAAVGPTTMASGGGAPMADNNEGADGVGNASGNWHCDSTWLGDRVITTSTRTWALPTYNNHLYKQISSASTGASNDNHYFGYSTPWGYFDFNRFHCHFSPRDWQRLINNNWGFRPKRLNFKLFNIQVKEVTTNDGVTTIANNLTSTVQVFSDSEYQPPYVLGSAHQGCLPPFPADVFMIPQYGHLTLNNGSQAVGRSSFYCLEYFPSQMLRTGNNFTFSYTFEEVPFHSSYAHSQSLDRLTNPLIDQYLYYLNRTQNQSGSAQNKDLLFSRGSPAGMSVQPKNWLPGPCYRQQRVSKTKTDNNNSNFTWTGASKYNLNGRESIINPGTAMASHKDDEDKFFPMSGVMIFGKESAGASNTALDNVMITDEEEIKATNPVATERFGTVAVNFQSSSTDPATGDVHAMGALPGMVWQDRDVYLQGPIWAKIPHTDGHFHPSPLMGGFGLKNPPPQILIKNTPVPANPPAEFSATKFASFITQYSTGQVSVEIEWELQKENSKRWNPEVQYTSNYAKSANVDFTVDNNGLYTEPRPIGTRYLTRPL

SEQ ID NO: 307 - protein, 736 aa, Artificial Sequence
  Description of Artificial Sequence: Synthetic polypeptide
MAADGYLPDWLEDNLSEGIREWWDLKPGAPKPKANQQEQDDGRGLVLPGYKYLGPFNGLDKGEPVNAADAAALEHDKAYDQQLKAGDNPYLRYNHADAEFQERLQEDTSFGGNLGRAVFQAKKRVLEPLGLVEEGAKTAPGKKRPVEQSPQEPDSSSGIGKTGQQPAKKRLNFGQTGDSESVPDPQPLGEPPATPAAVGPTTMASGGGAPMADNNEGADGVGNASGNWHCDSTWLGDRVITTSTRTWALPTYNNHLYKQISSASTGASNDNHYFGYSTPWGYFDFNRFHCHFSPRDWQRLINNNWGFRPKRLNFKLFNIQVKEVTTNDGVTTIANNLTSTVQVFSDSEYQLPYVLGSAHQGCLPPFPADVFMIPQYGYLTLNNGSQAVGRSSFYCLEYFPSQMLRTGNNFTFSYTFEEVPFHSSYAHSQSLDRLMNPLIDQYLYYLNRTQNQSGSAQNKDLLFSRGSPAGMSVQPKNWLPGPCYRQQRVSKTKTDNNNSNFTWTGASKYNLNGRESIINPGTAMASHKDDEDKFFPMSGVMIFGKESAGASNTALDNVMITDEEEIKATNPVATERFGTVAVNFQSSSTDPATGDVHATGTLPGMVWQDRDVYLQGPIWAKIPHTDGHFHPSPLMGGFGLKNPPPQILIKTTPVPANPPAEFSATKFASFITQYSTGQVSVEIEWELQKENSKRWNPEVQYTSNYAKSANVDFTVDDNGLYTEPRPIGTRYLTRPL

SEQ ID NO: 308 - protein, 736 aa, Artificial Sequence
  Description of Artificial Sequence: Synthetic polypeptide
MAADGYLPDWLEDNLSEGIREWWDLKPGAPKPKANQQKQDDGRGLVLPGYKYLGPFNGLDKGEPVNAADAAALEHDKAYDQQLKAGDNPYLRYNHADAEFQERLQEDTSFGGNLGRAVFQAKKRVLEPLGLVEEGAKTAPGKKRPVEQSLQEPDSSSGIGKTGQQPAKKRLNFGQTGDSESVPDPQPLGEPPATPAAVGPTTMASGGGAPMADNNEGADGVGNASGNWHCDSTWLGDRVITTSTRTWALPTYNNHLYKQISSASTGASNDNHYFGYSTPWGYFDFNRFHCHFSPRDWQRLINNNWGFRPKRLNFKLFNIQVKEVTTNDGVTTIANNLTSTVQVFSDSEYQLPYVLGSAHQGCLPPFPADVFMIPQYGYLTLNNGSQAVGRSSFYCLEYFPSQMLRTGNNFTFSYTFEEVPFHSSYAHSQSLDRLMNPLIDQYLYYLNRTQNQSGSAQNKDLLFSRGSPAGMSVQPKNWLPGPCYRQQRVSKTKTDNDNSNFTWTGASKYNLNGRESIINPGTAMASHKDDEDKFFPMSGVMIFGKESAGASNTALDNVMITDEEEIKATNPVATERFGTVAVNFQSSSTDPATGDVHAMGALPGMVWQDRDVYLQGPIWAKIPHTDGHFHPSPLMGGFGLKNPPPQILIKNTPVPANPPAEFSATKFASFITQYSTGQVSVEIEWELQKENSKRWNPEVQYTSNYAKSANVDFTVDNNGLYTEPRPIGTRYLTRPL

SEQ ID NO: 309 - protein, 736 aa, Artificial Sequence
  Description of Artificial Sequence: Synthetic polypeptide
MAADGYLPDWLEDNLSEGIREWWDLKPGAPKPKANQQKQDDGRGLVLPGYKYLGPFNGLDKGEPVNAADAAALEHDKAYDQQLKAGDNPYLRYNHADAEFQERLQEDTSFGGNLGRAVFQAKKRVLEPLGLVEEGAKTAPGKKRPVEQSPQEPDSSSGIGKTGQQPAKKRLNFGQTGDSESVPDPRPLGEPPATPAAVGPTTMASGGGAPMADNNEGADGVGNASGNWHCDSTWLGDRVITTSTRTWALPTYNNHLYKQISSASTGASNDNHYFGYSTPWGYFDFNRFHCHFSPRDWQRLINNNWGFRPKRLNFKLFNIQVKEVTTNDGVTTIANNLTSTVQVFSDSEYQLPYVLGSAHQGCLPPFPADVFMIPQYGYLTLNNGSQAVGRSSFYCLEYFPSQMLRTGNNFTFSYTFEEVPFHSSYAHSQSLDRLMNPLIDQYLYYLNRTQNQSGSAQNKDLLFSRGPPAGMSVQPKNWLPGPCYRQQRVSKTKTDNNNSNFTWTGASKYNLNGRESIINPGTAMASHKDDEDKFFPMSGVMIFGKESAGASNTALDNVMITDEEEIKATNPVATERFGTVAVNFQSSSTDPATGDVHAMGALPGMVWQDRDVYLQGPIWAKIPHTDGHFHPSPLMGGFGLKNPPPQILIKNTPVPANPPAEFSATKFASFITQYSTGQVSVEIEWELQKENSKRWNPEVQYTSNYAKSANVDFTVDNNGLYTEPRPIGTRYLTRPL

SEQ ID NO: 310 - protein, 736 aa, Artificial Sequence
  Description of Artificial Sequence: Synthetic polypeptide
MAADGYLPDWLEDNLSEGIREWWDLKPGAPKPKANQQKQDDGRGLVLPGYKYLGPFNGLDKGEPVNAADAAALEHDKAYDQQLKAGDNPYLRYNHADAEFQERLQEDTSFGGNLGRAVFQAKKRVLEPLGLVEEGAKTAPGKKRPVEQSPQEPDSSSGIGKTGQQPAKKRLNFGQTGDSESVPDPQPLGEPPATPAAVGPTTMASGGGAPMADNNEGADGVGNASGNWHCDSTWLGDRVITTSTRTWALPTYNNHLYKQISSASTGASNDNHYFGYSTPWGYFDFNRFHCHFSPRDWQRLINNNWGFRPKRLNFKLFNIQVKEVTTNDGVTTIANNLTSTVQVFSDSEYQLPYVLGSAHQGCLPPFPADVFMIPQYGYLTLNNGSQAVGRSSFYCLEYFPSQMLRTGNNFTFSYTFEEAPFHSSYAHSQSLDRLMNPLIDQYLYYLNRTQNQSGSAQNKDLLFSRGSPAGMSVQPKNWLPGPCYRQQRVSKTKTDNNNSNFTWTGASKYNLNGRESIINPGTAMASHKDDEDKFFPMSGVMIFGKESAGASNTALDNVMITDEEEIKATNPVATERFGTVAVNFQSSSTDPATGDVHAMGALPGMVWQDRDVYLQGPIWAKIPHTDGHFHPSPLMGGFGLKNPPPQILIKNTPVPANPPAEFSATKFASFITQYSTGQVSVEIEWELQKENSKRWNPEVQYTSNYAKSANVDFTVDNNGLYTEPRPVGTRYLTRPL

SEQ ID NO: 311 - protein, 736 aa, Artificial Sequence
  Description of Artificial Sequence: Synthetic polypeptide
MAADGYLPDWLEDNLSEGIREWWDLKPGAPKPKANQQKQDDGRGLVLPGYKYLGPFNGLDKGEPVNAADAAALEHDKAYDQQLKAGDNPYLRYNHADAEFQERLQEDTSFGGNLGRAVFQAKKRVLEPLGLVEEGAKTAPGKKRPVEQSPQEPDSSSGIGKTGQQPAKKRLNFGQTGDSESVPDPQPLGEPPATPAAVGPTTMASGGGAPMADNNEGADGVGNAPGNWHCDSTWLGDRVITTSTRTWALPTYNNHLYKQISSASTGASNDNHYFGYSTPWGYFDFNRFHCHFSPRDWQRLINNNWGFRPKRLNFKLFNIQVKEVTTNDGVTTIANNLTSTVQVFSDSEYQLPYVLGSAHQGCLPPFPADVFMIPQYGYLTLNNGSQAVGRSSFYCLEYFPSQMLRTGNNFTFSYTFEEVPFHSSYAHSQSLDRLMNPLIDQYLYYLNRTQNQSGSAQNKDLLFSRGSPAGMSVQPKNWLPGPCYRQQRVSKTKTDNNNSNFTWTGASKYNLNGRESIINPGTAMASHKDDEDKFFPMSGVMIFGKESAGASNTALDNVMITGEEEIKATNPVATERFGTVAVNFQSSSTDPATGDVHAMGALPGMVWQDRDVYLQGPIWAKIPHTDGHFHPSPLMGGFGLKNPPPQILIKNTPVPANPPAEFSATKFASFITQYSTGQVSVEIEWELQKENSKRWNPEVQYTSNYAKSANVDFTVDNNGLYTEPRPIGTRYLTRPL

SEQ ID NO: 312 - protein, 736 aa, Artificial Sequence
  Description of Artificial Sequence: Synthetic polypeptide
MAADGYLPDWLEDNLSEGIREWWDLKPGAPKPKANQQKQDDGRGLVLPGYKYLGPFNGLDKGEPVNAADAAALEHDKAYDQQLKAGDNPYLRYNHADAEFQERLQEDTSFGGNLGRAVFQAKKRVLEPLGLVEEGAKTAPGKKRPVEQSPQEPDSSSGIGKTGQQPAKKRLNFGQTGDSESVPDPQPLGEPPATPAAVGPTTMASGGGAPMADNNEGADGVGNASGNWHCDSTWLGDRVITTSTRTWALPTYNNHLYKQISSASTGASNDNHYFGYSTPWGYFDFNRFHCHFSPRDWQRLINNNWGFRPKRLNFKLFNIQVKEVTTNDGVTTIANNLTSTVQVFSDSEYQLPYVLGSAHQGCLPPFPADVFMIPQYGYLTLNNGSQAVGRSSFYCLEYFPSQMLRTGNNFTFSYTFEEVPFHSSYAHSQSLDRLMNPLIDQYLYYLNRTQNQSGSAQNKDLLFSRGSPAGTSVQPKNWLPGPCYRQQRVSKTKTDNNNSNFTWTGASKYNLNGRESIINPGTAMASHKDDEDKFFPMSGVMIFGKESAGASNTALDNVMITDEEEIKATNPVATERFGTVAVNFQSSSTDPATGDVHAMGALPGMVWQDRDVYLQGPIWAKIPHTDGHFHPSPLMGGFGLKNPPPQILIKNTPVPANPPAEFSATKFASFITQYSTGQVSVEIEWELQKENSKRWNPEVQYTSNYAKSANVDFTVDNNGLYTGPRPIGTRYLTRPL

SEQ ID NO: 313 - protein, 736 aa, Artificial Sequence
  Description of Artificial Sequence: Synthetic polypeptide
MAADGYLPDWLEDNLSEGIREWWDLKPGAPKPKANQQKQDDGRGLVLPGYKYLGPFNGLDKGEPVNAADAAALEHDKAYDQQLKAGDNPYLRYNHADAEFQERLQEDTSFGGNLGRAVFQAKKRVLEPLGLVEEGAKTAPGKKRPVEQSPQEPDSSSGIGKTGQQPAKKRLNFGQTGDSESVPDPQPLGEPPATPAAVGPTTMASGGGAPMADNNEGADGVGNASGNWHCDSTWLGGRVITTSTRTWALPTYNNHLYKQISSASTGASNDNHYFGYSTPWGYFDFNRFHCHFSPRDWQRLINNNWGFRPKRLNFKLFNIQVKEVTTNDGVTTIANNLTSTVQVFSDSEYQLPYVLGSAHQGCLPPFPADVFMIPQYGYLTLNNGSQAVGRSSFYCLEYFPSQMLRTGNNSTFSYTFEEVPFHSSYAHSQSLDRLMNPLIDQYLYYLNRTQNQSGSAQNKDLLFSRGSPAGMSVQPKNWLPGPCYRQQRVSKTKTDNNNSNFTWTGASKYNLNGRESIINPGTAMASHKDDEDKFFPMSGVMIFGKESAGASNTALDNVMITDEEEIKATNPVATERFGTVAVNFQSSSTDPATGDVHAMGTLPGMVWQDRDVYLQGPIWAKIPHTDGHFHPSPLMGGFGLKNPPPQILIKNTPVPANPPAEFSATKFASFITQYSTGQVSVEIEWELQKENSKRWNPEVQYTSNYAKSANVDFTVDNNGLYTEPRPIGTRYLTRPL

SEQ ID NO: 314 - protein, 736 aa, Artificial Sequence
  Description of Artificial Sequence: Synthetic polypeptide
MAADGYLPDWLEDNLSEGIREWWDLKPGAPKPKANQQKQDDGRGLVLPGYKYLGPFNGLDKGEPVSAADAAALEHDKAYDQQLKAGDNPYLRYNHADAEFQERLQEDTSFGGNLGRAVFQAKKRVLEPLGLVEEGAKTAPGKKRPVEQSPQEPDSSSGIGKTGQQPAKERLNFGQTGDSESVPDPQPLGEPPATPAAVGPTTMASGGGAPMADNNEGADGVGNASGNWHCDSTWLGDRVITTSTRTWALPTYNNHLYKQISSASTGASNDNHYFGYSTPWGYFDFNRFHCHFSPRDWQRLINNNWGFRPKRLNFKLFNIQVKEVTTNDGVTTIANNLTSTVQVFSDSEYQLPYVLGSAHQGCLPPFPADVFMIPQYGYLTLNNGSQAVGRSSFYCLEYFPSQMLRTGNNFTFSYTFEEVPFHSSYAHSQSLDRLMNPLIDQYLYYLNRTQNQSGSAQNKDLLFSRGSPAGMSVQPKNWLPGPCYRQQRVSKTKTDNNNSNFTWTGASKYNLNGRESIINPGTAMASHKDDEDKFFPMSGVMIFGKESAGASNTALDNVMITDEEEIKATNPVATERFGTVAVNFQSSSTDPATGDVHAMGALPGMVWQDRDVYLQGPIWAKIPHTDGHFHPSPLMGGFGLKNPPPQILIKNTPVPANPPAEFSATKFASFITQYSTGQVSVEIEWELQKENSKRWNPEVQYTSNYAKSANVDFTVDNNGLYTEPRPIGTRYLTRPL

SEQ ID NO: 315 - protein, 736 aa, Artificial Sequence
  Description of Artificial Sequence: Synthetic polypeptide
MAADGYLPDWLEDNLSEGIREWWDLKPGAPKPKANQQKQDDGRGLVLPGYKYLGPFNGLDKGEPVNAADAAALEHDKAYDQQLKAGDNPYLRYNHADAEFQERLQEDTSFGGNLGRAVFQAKKRVLEPLGLVEEGAKTAPGKKRPVEQSPQEPDSSSGIGKTGQQPAKKRLNFGQTGDSESVPDPQPLGEPPATPAAVGPTTMASGGGAPMADNNEGADGVGNASGNWHCDSTWLGDRVITTSTRTWALPTYNNHLYKQISSASTGASNDNHYFGYSTPWGYFDFNRFHCHFSPRDWQRLINNNWGFRPKRLNFKLFNIQVKEVTTNDGVTTIANNLTSTVQVFSDSEYQLPYVLGSAHQGCLPPFPADVFMIPQYGYLTLNNGSQAVGRSSFYCLEYFPSQMLRTGNNFTFSYTFEEVPFHSSYAHSQSLDRLMNPLIDQYLYYLNRTQNQSGSAQNKDLLFSRGSPAGMSVQPKNWLPGPCYRQQRVSKTKTDNNNSNFTWTGASKYNLNGRESIINPGTAMASHKDDEDKFFPMSGVMIFGKESAGASNTALDNVMITDEGEIKATNPVATERFGTVAVNFQSSSTDPATGDVHAMGALPGMVWQDRDVYLQGPIWAKIPHTDGHFHPSPLMGGFGLKNPPPQILIKNTPVPANPPAEFSATKFASFITQYSTGQVSVEIEWELQKENSKRWNPEVQYTSNYAKSANVDFTVDNNGLYTEPRPIGTRYLTRPL

SEQ ID NO: 316 - protein, 735 aa, Artificial Sequence
  Description of Artificial Sequence: Synthetic polypeptide
MAADGYLPDWLEDNLSEGIREWWDLKPGAPKPKANQQKQDDGRGLVLPGYKYLGPFNGLDKGEPVNAADAAALEHDKAYDQQLKAGDNPYLRYNHADAEFQERLQENTSFGGNLGRAVFQAKKRVLEPLGLVEEGAKTAPGKKRPVEQSPQEPDSSSGIGKTGQQPAKKRLNFGQTGDSESVPDPQPLGEPPATPAAVGPTTMASGGGAPMADNNEGADGVGNASGNWHCDSTWLGDRVITTSTRTWALPTYNNHLYKQISSASTGASNDNHYFGYSTPWGYFDFNRFHCHFPPRDWQRLINNNWGFRPKRLNFKLFNIQVKEVTSNDGVTTIANNLTSTVQVFSDSEYQLPYVLGSAHQGCLPPFPADVFMIPQYGYLTLNNGSQAVGRSSFYCLEYFPSQMLRTGNNFTFSYTFEEVPFHSSYAHSQSLDRLMNPLIDQYLYYLNRTQNQSGSAQNKDLLFSRGSPAGMSVQPKNWLPGPCYRQQRVSKTKTDNNNSNFTWTGASKYNLNGRESIINPGTAMASHKDDEDKFFPMSGVMIFGKESAGASNTALDNVMITDEEEIKATNPVATERFGTVAVNFQSSSTDPATGDVHAMGALPGMVWQDRDVYLQGPIWAKIPHTDGHFHPSPLMGGFGLNPPPQILIKNTPVPANPPAEFSATKFASFITQYSTGQVSVEIEWELQKENSKRWNPEVQYTSNYAKSANVDFTVDNNGLYTEPRPIGTRYLTRPL

SEQ ID NO: 317 - protein, 736 aa, Adeno-associated virus
MAADGYLPDWLEDNLSEGIREWWDLKPGAPKPKANQQKQDDGRGLVLPGYKYLGPFNGLDKGEPVNAADAAALEHDKAYDQQLKAGDNPYLRYNHADAEFQERLQEDTSFGGNLGRAVFQAKKRVLEPFGLVEEGAKTAPGKKRPVEQSPQEPDSSSGIGKTGQQPAKKRLNFGQTGDSESVPDPQPLGEPPATPAAVGPTTMASGGGAPMADNNEGADGVGNASGNWHCDSTWLGDRVITTSTRTWALPTYNNHLYKQISSASTGASNDNHYFGYSTPWGYFDFNRFHCHFSPRDWQRLINNNWGFRPKRLNFKLFNIQVKEVTTNDGVTTIANNLTSTVQVFSDSEYQLPYVLGSAHQGCLPPFPADVFMIPQYGYLTLNNGSQAVGRSSFYCLEYFPSQMLRTGNNFTFSYTFEDVPFHSSYAHSQSLDRLMNPLIDQYLYYLNRTQNQSGSAQNKDLLFSRGSPAGMSVQPKNWLPGPCYRQQRVSKTKTDNNNSNFTWTGASKYNLNGRESIINPGTAMASHKDDKDKFFPMSGVMIFGKESAGASNTALDNVMITDEEEIKATNPVATERFGTVAVNLQSSSTDPATGDVHVMGALPGMVWQDRDVYLQGPIWAKIPHTDGHFHPSPLMGGFGLKHPPPQILIKNTPVPANPPAEFSATKFASFITQYSTGQVSVEIEWELQKENSKRWNPEVQYTSNYAKSANVDFTVDNNGLYTEPRPIGTRYLTRPL

SEQ ID NO: 318 - protein, 736 aa, Artificial Sequence
  Description of Artificial Sequence: Synthetic polypeptide
MAADGYLPDWLEDNLSEGIREWWDLKPGAPKPKANQQKQDDGRGLVLPGYKYLGPFNGLDKGEPVNAADAAALEHDKAYDQQLKAGDNPYLRYNHADAEFQERLQEDTSFGGNLGRAVFQAKKRVLEPFGLVEEGAKTAPGKKRPVEQSPQEPDSSSGIGKTGQQPAKKRLNFGQTGDSESVPDPQPLGEPPATPAAVGPTTMASGGGAPMADNNEGADGVGNASGNWHCDSTWLGDRVITTSTRTWALPTYNNHLYKQISSASTGASNDNHYFGYSTPWGYFDFNRFHCHFSPRDWQRLINNNWGFRPKRLNFKLFNIQVKEVTTNDGVTTIANNLTSTVQVFSDSEYQLPYVLGSAHQGCLPPFPADVFMIPQYGYLTLNNGSQAVGRSSFYCPEYFPSQMLRTGNNFTFSYTFEEVPFHSSYAHSQSLDRLMNPLIDQYLYYLNRTQNQSGSAQNKDLLFSRGSPAGMSVQPKNWLPGPCYRQQRVSKTKTDNNNSNFTWTGASKYNLNGRESIINPGTAMASHKDDKDKFFPMSGVMIFGKESAGASNTALDNVMITDEEEIKATNPVATERFGTVAVNFQSSNTDPATGDVHVMGALPGMVWQDRDVYLQGPIWAKIPHTDGHFHPSPLMGGFGLKHPPPQILIKNTPVPANPPAEFSATKFASFITQYSTGQVSVEIEWELQKENSKRWNPEVQYTSNYAKSANVDFTVDNNGLYTEPRPIGTRYLTRPL

SEQ ID NO: 319 - protein, 736 aa, Artificial Sequence
  Description of Artificial Sequence: Synthetic polypeptide
  MOD_RES (102)..(102): Any amino acid
MAADGYLPDWLEDNLSEGIREWWDLKPGAPKPKANQQKQDDGRGLVLPGYKYLGPFNGLDKGEPVNAADAAALEHDKAYDQQLKAGDNPYLRYNHADAEFQXRLQEDTSFGGNLGRAVFQAKKRVLEPFGLVEEGAKTAPGKKRPVEQSPQEPDSSSGIGKTGQQPAKKRLNFGQTGDSESVPDPQPLGEPPATPAAVGPTTMASGGGAPMADNNEGADGVGNASGNWHCDSTWLGGRVITTSTRTWALPTYNNHLYKQISSASTGASNDNHYFGHSTPWGYFDFNRFHCHFSPRDWQRLINNNWGFRPKRLNFKLFNIQVKEVTTNDGVTTIANNLTSTVQVFSDSEYQLPYVLGSAHQGCLPPSPADVFMIPQYGYLTLNNGSQAVGRSSFYCLEYFPSQMLRTGNNFTFSYTFEEVPFHSSYAHSQSLDRLMNPLIDQYLYYLNRTQNQSGSAQNKDLLFSRGSPAGMSVQPKNWLPGPCYRQQRVSKTKTDNNNSNFTWTGASKYNLNGRESIINPGTAMASHKDDKDKFFPMSGVMIFGKESAGASNTALDNVMITDEEEIKATNPVATERFGTVAVNFQSSNTDPATGDVHVMGALPGMVWQDRDVYLQGPIWAKIPHTDGHFHPSPLMGGFGLKHPPPQILIKNTPVPANPPAEFSATKFASFITQYSTGQVSVEIEWELQKENSKRWNPEVQYTSNYAKSANVDFTVDNNGLYTEPRPIGTRYLTRPL

SEQ ID NO: 320 - protein, 736 aa, Artificial Sequence
  Description of Artificial Sequence: Synthetic polypeptide
MAADGYLPDWLEDNLSEGIREWWDLKPGAPKPKANQQKQDDGRGLVLPGYKYLGPFNGLDKGEPVNAADAAALEHDKAYDQQLKAGDNPYLRYNHADAEFQERLQEDTSFGGNLGRAVFQAKKRVLEPFGLVEEGAKTAPGKKRPVEQSPQEPDSSSGIGKTGQQPAKKRLNFGQTGDSESVPDPQPLGEPPATPAAVGPTTMASGGGAPMADNNEGADGVGNASGNWHCDSTWLGDRVITTSTRTWALPTYNNHLYKQISSASTGASNDNHYFGYSTPWGYFDFNRFHCHFSPRDWQRLINNNWGFRPKRLNFKLFNIQVKEVTTNDGVTTIANNLTSTVQVFSDSEYQLPYVLGSAHQGCLPPFPADVFMIPQYGYLTLNNGSQAVGRSSFYCLEYFPSQMLRTGNNFTFSYTFEEVPFHSSYAHSQSLDRLMNPLIDQYLYYLNRTQNQSGSAQNKDLLFSRGSPAGMSVQPKNWLPGPCYRQQRVSKTKTDNNNSNFTWTGASKYNLNGRESIINPGTAMASHKDDKDKFFPMSGVMIFGKESAGASNTALDNVMITDEEEIKATNPVATERFGTVAVNFQSSDTDPATGDVHVMGALPGMVWQDRDVYLQGPIWAKIPHTDGHFHPSPLMGGFGLKHPPPQILIKNTPVPANPPAEFSATKFASFITQYSTGQVSVEIEWELQKENSKRWNPEVQYTSNYAKSANVDFTVDNNGLYTEPRPIGTRYLTRPL

SEQ ID NO: 321 - protein, 736 aa, Artificial Sequence
  Description of Artificial Sequence: Synthetic polypeptide
MAADGYLPDWLEDNLSEGIREWWDLKPGAPKPKANQQKQGDGRGLVLPGYKYLGPFNGLDKGEPVNAADAAALEHDKAYDQQLKAGDNPYLRYNHADAEFQERLQEDTSFGGNLGRAVFQAKKRVLEPFGLVEEGAKTAPGKKRPVEQSPQEPDSSSGIGKTGQQPAKKRLNFGQTGDSESVPDPQPLGEPPATPAAVGPTTMASGGGAPMADNNEGADGVGNASGNWHCDSTWLGDRVITTNTRTWALPTYNNHLYKQISSASTGASNDNHYFGYSTPWGYFDFNRFHCHFSPRDWQRLINNNWGFRPKRLNFKLFNIQVKEVTTNDGVTTIANNLTSTVQVFSDSEYQLPYVLGSAHQGCLPPFPADVFMIPQYGYLTLNNGSQAVGRSSFYCLEYFPSQMLRTGNNFTFSYTFEEVPFHSSYGHSQSLDRLMNLLIDQYLYYLNRTQNQSGSAQNKDLLFSRGSPAGMFVQPKNWLPGPCYRQQRVSKTKTDNNNSNFTWTGASKYNLNGRESIINPGTAMASHKDDEDKFFPMSGVMIFGKESAGASNTALDNVMITDEEEIKATNPVATERFGTVAVNFQSSSTDPATGDVHVMGALPGMVWQDRDVYLQGPIWAKIPHTDGHFHPSPLMGGFGLKHPPPQILIKNTPVPANPPAEFSATKFASFITQYSTGQVSVEIEWELQKENSKRWNPEVQYTSNYAKSANVDFTVDNNGLYTEPRPIGTRYLTRPL

SEQ ID NO: 322 - protein, 736 aa, Artificial Sequence
  Description of Artificial Sequence: Synthetic polypeptide
MAADGYLPDWLEDNLSEGIREWWDLKPGAPKPKANQQKQDDGRGLVLPGYKYLGPFNGLDKGEPVNAADAAALEHDKAYDQQLKAGDNPYLRYNHADAEFQERLQEDTSFGGNLGRAVFQAKKRVLEPFGLVEEGAKTAPGKKRPVEQSPQEPDSSSGIGKTGQQPAKKRLNFGQTGDSESVPDPQPLGEPPATPAAVGPTTMASGGGAPMADNNEGADGVGNASGNWHCDSTWLGDRVITTNTRTWALPTYNNHLYKQISSASTGASNDNHYFGYSTPWGYFDFNRFHCHFSPRDWQRLINNNWGFRPKRLNFKLFNIQVKEVTTNDGVTTIANNLTSTVQVFSDSEYQLPYVLGSAHQGCLPPFPADVFMIPQYGYLMLNNGSQAVGRSSFYCLEYFPSQMLRTGNNFTFSYTFEEVPFHSSYAHSQSLDRLMNPLIDQYLYYLNRTQNQSGSAQNKDLLFSRGSPAGMSVQPKNWLPGPCYRQQRVSKTKTDNNNSNFTWTGASKYNLNGRESIINPGTAMASHKDDEDKFFPMSGVMIFGKESAGASNTALDNVMITDEEEIKATNPAATERFGTVAVNFQSSSTDPATGDVHVMGALPGMVWQDRDVYLQGPIWAKIPHTDGHFHPSPLMGGFGLKHPPPQILIKNTPVPANPPAEFSATKFASFITQYSTGQVSVEIEWELQKENSKRWNPEVQYTSNYAKSANVDFTVDNNGLYTEPRPIGTRYLTRPL

SEQ ID NO: 323 - protein, 736 aa, Artificial Sequence
  Description of Artificial Sequence: Synthetic polypeptide
MAADGYLPDWLEDNLSEGIREWWDLKPGAPKPKANQQKQDDGRGLVLPGYKYLGPFNGLDKGEPVNAADAAALEHDKAYDQQLKAGDNPYLRYNHADAEFQERLQEDTSFGGNLGRAVFQAKKRVLEPFGLVEEGAKTAPGKKRPVEQSPQEPDSSSGIGKTGQQPAKKRLNFGQTGDSESVPDPQPLGEPPATPAAVGPTTMASGGGAPMADNNEGADGVGNASGNWHCDSTWLGDRVITTSTRTWALPTYNNHLYKQISSASTGASNDNHYFGYSTPWGYFDFNRFHCHFSPRDWQRLINNNWGFRPKRLNFKLFNIQVKEVTTNDGVTTIANNLTSTVQVFSDSEYQLPYVLGSAHQGCLPPFPADVFMIPQYGYLTLNNGSQAVGRSSFYCLEYFPSQMLRTGNNFTFSYTFEEVPFHSSYAHSQSLDRLMNPLIDQYLYYLNRTQNQSGSAQNKDLLFSRGSPAGMSVQPKNWLPGPCYRQQRVSKTKTDNNNSNFTWTGASKYNLNGRESIINPGTAMASHKDDEDKFFPMSGVMIFGKESAGASNTALDNVMITDEEEIKATNPVATERFGTVAVNFQSSSTDPATGDVHVMGALPGMVWQDRDVYLQGPIWAKIPHTDGHFHPSPLMGGFGLKHPPPQILIKNTPVPANPPAEFSATKFASFITQYSTGQVSVEIEWELQKENSKRWNPEVQYTSNYAKSANVDFTVDNNGLYTEPRPIGTRYLTRPL

SEQ ID NO: 324 - protein, 736 aa, Artificial Sequence
  Description of Artificial Sequence: Synthetic polypeptide
MAADGYFPDWLEDNLSEGIREWWDLKPGAPKPKANQQKQDDGRGLVLPGYKYLGPFNGLDKGEPVNAADAAALEHDKAYDQQLKAGDNPYLRYNHADAEFQERLQEDTSFGGNLGRAVFQAKKRVLEPFGLVEEGAKTAPGKKRPVEQSPQEPDSSSGIGRTGQQPAKKRLNFGQTGDSESVPDPQPLGEPPATPAAVGPTTMASGGGAPMADNNEGADGVGNASGNWHCDSTWLGDRVITTSTRTWALPTYNNHLYKQISSASTGASNDNHYFGYSTPWGYFDFNRFHCHFSPRDWQRLINNNWGFRPKRLNFKLFNIQVKEVTTNDGVTTIANNLTSTVQVFSDSEYQLPYVLGSAHQGCLPPFPADVFMIPQYGYLTLNNGSQAVGRSSFYCLEYFPSQMLRTGNNFTFSYTFEEVPFHSSYAHSQSLDRLMNPLIDQYLYYLNRTQNQSGSAQNKDLLFSRGSPAGMSVQPKNWLPGPCYRQQRVSKTKTDNNNSNFTWTGASKYNLNGRESIINPGTAMASHKDDEDKFFPMSGVMIFGKESAGASNTALDNVMITDEEEIKATNPVATERFGTVAVNFQSSSPDPATGDVHVMGALPGMVWQDRDVYLQGPIWAKIPHTDGHFHPSPLMGGFGLKHPPPQILIKNTPVPANPPAEFSATKFASFITQYSTGQVSVEIEWELQKENSKRWNPEVQYTSNYAKSANVDFTVDNNGLYSEPRPIGTRYLTRPL

SEQ ID NO: 325 - protein, 736 aa, Artificial Sequence
  Description of Artificial Sequence: Synthetic polypeptide
MAADGYPPDWLEDNLSEGIREWWDLKPGVPKPKANQQKQDDGRGLVLPGYKYLGPFNGLDKGEPVNAADAAALEHDKAYDQQLKAGDNPYLRYNHADAEFQERLQEDTSFGGNLGRAVFQAKKRVLEPFGLVEEGAKTAPGKKRPVEQSPQEPDSSSGIGKTGQQPAKKRLNFGQTGDSESVPDPQPLGEPPATPAAVGPTTMASGGGAPMADNNEGADGVGNASGNWHCDSTWLGDRVITTSTRTWALPTYNNHLYKQISSASTGASNDNHYFGYSTPWGYFDFNRFHCHFSPRDWQRLINNNWGFRPKRLNFKLFNIQVKEVTTNDGVTTIANNLTSTVQVFSDSEYQLPYVLGSAHQGCLPPFPADVFMIPQYGYLTLNNGSQAVGRSSFYCLEYFPSQMLRTGNNFTFSYTFEEVPFHSSYAHSQSLDRLMNPLIDQYLYYLNRTQNQSGSAQNKDLLFSRGSPAGMSVQPKNWLPGPCYRQQRVSKTKTDNNNSNFTWTGASKYNLNGRESIINPGTAMASHKDDEDKFFPMSGVMIFGKESAGASNTALDNVMITDEEEIKATNPVATERFGTVAVNFQSSSTDPATGDVHVMGALPGMVWQDRDVYLQGPIWAKIPHTDGHFHPSPLMGGFGLKHPPPQILIKNTPVPANPPAEFSATKFASFITQYSTGQVSVEIEWELQKENSKRWNPEVQYTSNYAKSANVDFTVDNNGLYTEPRPIGTRYLTRPL

SEQ ID NO: 326 - protein, 736 aa, Artificial Sequence
  Description of Artificial Sequence: Synthetic polypeptide
MAADGYLPDWLEDNLSEGIREWWDLKPGAPKPKANQQKQDDGRGLVLPGYKYLGPFNGLDKGEPVNAADAAALEHDKAYDQQLKAGDNPYLRYNHADAEFQERLQEDTSFGGNLGRAVFQAKKRVLEPFGLVEEGAKTAPGKKRPVEQSPQEPDSSSGIGKTGQQPAKKRLNFGQTGDSESVPDPQPLGEPPATPAAVGPTTMASGGGAPMADNNEGADGVGNASGNWHCDSTWLGDRVITTSTRTWALPTYNNHLYKQTSSASTGASNDNHYFGYSTPWGYFDFNRFHCHFSPRDWQRLINNNWGFRPKRLNFKLFNIQVKEVTTNDGVTTIANNLTSTVQVFSDSEYQLPYVLGSAHQGCLPPFPADVFMIPQYGYLTLNNGSQAVGRSSFYCLEYFPSQMLRTGNNFTFSYTFEEVPFHSSYAHSQSLDRLMNPLIDQYLYYLNRTQNQSGSAQNKDLLFSRGSPAGMSVQPKNWLPGPCYRQQRVSKTKTDYNNSNFTWTGASKYNLNGRESIINPGTAMASHKDDEDKFFPMSGVMIFGKESAGASNTALDNVMITDEEEIKATNPVATERFGTVAVNFQSSSTDPATGDVHVMGALPGMVWQDRDVYLQGPIWAKIPHTDGHFHPSPLMGGFGLKHPPPQILIKNTPVPANPPAEFSATKFASFITQYSTGQVSVEIEWELQKENSKRWNPEVQYTSNYAKSANVDFTVDNNGLYTEPRPIGTRYLTRPL

SEQ ID NO: 327 - protein, 736 aa, Artificial Sequence
  Description of Artificial Sequence: Synthetic polypeptide
MAADGYLPDWLEDNLSEGIREWWDLKPGAPKPKANQQKQDDGRGLVLPGYKYLGPFNGLDKGEPVNAADAAALEHDKAYDQQLKAGDNPYLRYNHADAEFQERLQEDTSFGGNLGRAVFQAKKRVLEPFGLVEEGAKTAPGKKRPVEQSPQEPDSSSGIGKTGQQPAKKRLNFGQTGDSESVPDPQPLGEPPATPAAVGPTTMASGGGAPMADNNEGADGVGNASGNWHCDSTWLGDRVITTSTRTWALPTYNNHLYKQISSASTGASNDNHYFGYSTPWGYFDFNRFHCHFSPRDWQRLINNNWGFRPKRLNFKLFNIQVKEVTTNDGVTTIANNLTSTVQAFSDSEYQLPYVLGSAHQGCLPPFPADVFMIPQYGYLTLNNGSQAVGRSSFYCLEYFPSQMLRTGNNFTFSYTFEEVPFHSSYAHSQSLDRLMNPLIDPYLYYLNRTQNQSGSAQNKDLLFSRGSPAGMSVQPKNWLPGPCYRQQRVSKTKTDNNNSNFTWTGASKYNLNGRESIINPGTAMASHKDDEDKFFPMSGVMIFGKESAGASNTALDNVMITDEEEIKATNPVATERFGTVAVNFQSSSTDPATGDVHVMGALPGMVWQDRDVYLQGPIWAKIPHTDGHFHPSPLMGGFGLKHPPPQILIKNTPVPANPPAEFSATKFASFITQYSTGQVSVEIEWELQKENSKRWNPEVQYTSNYAKSANVDFTVDNNGLYTEPRPIGTRYLTRPL

SEQ ID NO: 328 - protein, 736 aa, Artificial Sequence
  Description of Artificial Sequence: Synthetic polypeptide
MAADGYLPDWLEDNLSEGIREWWDLKPGAPKPKANQQKQDDGRGLVLPGYKYLGPFNGLDKGEPVNAADAAALEHDKAYDQQLKAGDNPYLRYNHADAEFQERLQEDTSFGGNLGRAVFQAKKRVLEPFGLVEEGAKTAPGKKRPVEQSPQEPDSSSGIGKTGQQPAKKRLNFGQTGDSESVPDPQPLGEPPATPAAVGPTTMASGGGAPMADNNEGADGVGNASGNWHCDSTWLGDRVITTSTRTWALPTYNNHLYKQISSASTGASNDNHYFGYSTPWGYFDFNRFHCHFSPRDWQRLINNNWGFRPKRLNFKLFNIQVKEVTTNDGVTTIANNLTSTVQVFSDSEYQLPYVLGSAHQGCLPPFPADVFMIPQYGYLTLNNGSQAVGRSSFYCLEYFPSQMLRTGNNFTFSYTFEEVPFHSSYAHSQSLDRLMNPLIDLYLYYLNRTQNQSGSAQNKDLLFSRGSPAGMSVQPKNWLPGPCYRQQRVSKTKTDNNNSNFTWTGASKYNLNGRESIINPGTAMASHKDDEDKFFPMSGVMIFGKESAGTSNTALDNVMITDEEEIKATNPVATERFGTVAVNFQSSSTDPATGDVHVMGALPGMVWQDRDVYLQGPIWAKIPHTDGHFHPSPLMGGFGLKHPPPQILIKNTPVPANPPAEFSATKFASFITQYSTGQVSVEIEWELQKENSKRWNPEVQYTSNYAKSANVDFTVDNNGLYTEPRPIGTRYLTRPL

SEQ ID NO: 329 - protein, 736 aa, Artificial Sequence
  Description of Artificial Sequence: Synthetic polypeptide
MAADGYLPDWLEDNLSEGIREWWDLKPGAPKPKANQQKQDDGRGLVLPGYKYLGPFNGLDKGEPVNAADAAALEHDKAYDQQLKAGDNPYLRYNHADAEFQERLQEDTSFGGNLGRAVFQAKKRVLEPFGLVEEGAKTAPGKKRPVEQSPQEPDSSSGIGKTGQQPAKKRLNFGQTGDSESVPDPQPLGEPPATPAAVGPTTMASGGGAPMADNNEGADGVGNASGNWHCDSTWLGDRVITTSTRTWALPTYNNHLYKQISSASTGASNDNHYFGYSTPWGYFDFNRFHCHFSPRDWQRLINNNWGFRPKRLNFKLFNIQVKEVTTNDGVTTIANNLTSTVQVFSDSEYQLPYVLGSAHQGCLPPFPADVFMIPQYGYLTLNNGSQAVGRSSFYCLEYFPSQMLRTGNNFTFSYTFEEVPFHSSYAHSQSLDRLMNPLIDQYLYYLNRTQNQSGSAQNKDLLFSRGSPAGMSVQPKNWLPGPCYRQQRVSKTKTDNNNSNFTWTGASKYNLNGRESIINPGTAMASHKDDEDKFFPMSGVMIFGKESAGASNTALDNVMITDEEEIKATNPVATERFGTVAVNFQSSSTDPATGDVHVMGALPGMVWQDRDVYLQGPIWAKIPHTDGHSHPSPLMGGFGLKHPPPQILIKNTPVPANPPAEFSATKFASFITQYSTGQVSVEIEWELQKENSKRWNPEVQYTSNYAKSANVDFTVDNNGLYTEPRPIGTRYLTRPL

SEQ ID NO: 330 - protein, 736 aa, Artificial Sequence
  Description of Artificial Sequence: Synthetic polypeptide
MAADGYLPDWLEDSLSEGIREWWDLKPGAPKPKANQQKQDDGRGLVLPGYKYLGPFNGLDKGEPVNAADAAALEHDKAYDQQLKAGDNPYLRYNHADAEFQERLQEDTSFGGNLGRAVFQAKKRVLEPFGLVEEGAKTAPGKKRPVEQSPQEPDSSSGIGKTGQQPAKKRLNFGQTGDSESVPDPQPLGEPPATPAAVGPTTMASGGGAPMADNNEGADGVGNASGNWHCDSTWLGDRVITTSTRTWALPTYNNHLYKQISSASTGASNDNHYFGYSTPWGYFDFNRFHCHFSPRDWQRLINNNWGFRPKRLNFKLFNIQVKEVTTNDGVTTIANNLTSTVQVFSDSEYQLPYVLGSAHQGCLPPFPADVFMIPQYGYLTPNNGSQAVGRSSFYCLEYFPSQMLRTGNNFTFSYTFEEVPFHSSYAHSQSLDRLMNPLIDQYQYYLNRTQNQSGSAQNKDLLFSRGSPAGMSVQPKNWLPGPCYRQQRVSKTKTDNNNSNFTWTGASKYNLNGRESIINPGTAMASHKDDEDKFFPMSGVMIFGKESAGASNTALDNVMITDEEEIKATNPVATERFGTVAVNFQSSSTDPATGDVHVMGALPGMVWQDRDVYLQGPIWAKIPHTDGHFHPSPLMGGFGLKHPPPQILIKNTPVPANPPAEFSATKFASFITQYSTGQVSVEIEWELQKENSKRWNPEVQYTSNYAKSANVDFTVDNNGLYTEPRPIGTRYLTRPL

SEQ ID NO: 331 - protein, 736 aa, Adeno-associated virus
MAADGYLPDWLEDNLSEGIREWWALKPGAPQPKANQQHQDNARGLVLPGYKYLGPGNGLDKGEPVNAADAAALEHDKAYDQQLKAGDNPYLKYNHADAEFQERLKEDTSFGGNLGRAVFQAKKRLLEPLGLVEEAAKTAPGKKRPVEQSPQEPDSSAGIGKSGAQPAKKRLNFGQTGDTESVPDPQPIGEPPAAPSGVGSLTMASGGGAPVADNNEGADGVGSSSGNWHCDSQWLGDRVITTSTRTWALPTYNNHLYKQISNSTSGGSSNDNAYFGYSTPWGYFDFNRFHCHFSPRDWQRLINNNWGFRPKRLNFKLFNIQVKEVTDNNGVKTIANNLTSTVQVFTDSDYQLPYVLGSAHEGCLPPFPADVFMIPQYGYLTLNDGSQAVGRSSFYCLEYFPSQMLRTGNNFQFSYEFENVPFHSSYAHSQSLDRLMNPLIDQYLYYLSKTINGSGQNQQTLKFSVAGPSNMAVQGRNYIPGPSYRQQRVSTTVTQNNNSEFAWPGASSWALNGRNSLMNPGPAMASHKEGEDRFFPLSGSLIFGKQGTGRDNVDADKVMITNEEEIKTTNPVATESYGQVATNHQSAQAQAQTGWVQNQGILPGMVWQDRDVYLQGPIWAKIPHTDGNFHPSPLMGGFGMKHPPPQILIKNTPVPADPPTAFNKDKLNSFITQYSTGQVSVEIEWELQKENSKRWNPEIQYTSNYYKSNNVEFAVNTEGVYSEPRPIGTRYLTRNL

SEQ ID NO: 332 - protein, 736 aa, Artificial Sequence
  Description of Artificial Sequence: Synthetic polypeptide
MAADGYLPDWLEDNLSEGIREWWALKPGAPQPKANQQHQDNARGLVLPDYKYLGPGNGLDKGEPVNAADVAALEHDKAYDQQLKAGDNPYLKYNHADAEFQERLKEDTSFGGNLGRAVFQAKKRLLEPLGLVEEAAKTAPGKKRPVEQSPQEPDSSAGIGKSGAQPAKKRLNFGQTGDTESVPDPQPIGEPPAAPSGVGSLTMASGGGAPVADNNEGADGVGSSSGNWHCDSQWLGDGVITTSTRTWALPTYNNHLYKQISNSTSGGSSNDNAYFGYSTPWGYFDFNRFHCHFSPRDWQRLINNNWGFRPKRLNFKLFNIQVKEVTDNNGVKTIANNLTSTVQVFTDSDYQLPYVLGSAHEGCLPPFPADVFMIPQYGYLTLNDGSQAVGRSSFYCLEYFPSQMLRTGNNFQFSYEFENVPFHSSYAHSQSLDRLMNPLIDQYLHYLPKTINGSGQNQQTLKFSVAGPSNMAVQGRNYIPGPSYRQQRVSTTVTQNNNSEFAWPGASSWALNGRNSLMNPGPAMASYKEGEDSFFPLSGSLIFGKQGTGRDNVDADKVMITNEEEIKTTNPVATESYGQVATNHQSAQAQAQTGWVQNQGILPGMVWQDRDVYLQGPIWAKIPHTDGNFHPSPLMGGFGMKHPPPQTLIKNTPVPADPPTAFNKDKLNSFITQYSTGQVSVEIEWELQKENSKRWNPEIQYTSNYYKSNNVEFAVNTEGVYSEPRPIGTRYLTRNL

SEQ ID NO: 333 - protein, 736 aa, Artificial Sequence
  Description of Artificial Sequence: Synthetic polypeptide
MAADGYLPDWLEDNLSEGIREWWALKPGAPQPKANQQHQDNARGLVLPGYKYLGPGNGLDKGEPVNAADAAALEHDKAYDQQLKAGDNPYLKYNHADAEFQERLKEDTSFGGNLGRAVFQAKRRLLEPLGLVEEAAKTAPGKKRPVEQSPQEPDSSAGIGKSGAQPAKKRLNFGQTGDTESVPDPQPIGEPPAAPSGVGSLTMASGGGAPVADNNEGADGVGSSSGNWHCDSQWLGDRVITTSTRTWALPTYNNHLYKQISNSTSGGSSNDNAYFGYSTPWGYFDFNRFHCHFSPRDWQRLINNNWGFRPKRLNFKLFNIQIKEVTDNNGVKTIANNLTSTVQVFTDLDYQLPYVLGSAHEGCLPPFPADVFMIPQYGYLTLNDGSQAVGRSSFYCLEYFPSQMLRTGNNFQFSYEFENVPFHSSYAHSQSLDRLMNPLIDQYLHYLSKTINGSGQNQQTLKFSVAGPSNMAVQGRNYIPGPSYRQQRVSTTVTQNNNSEFAWPGASSWALNGRNSLMNPGPAMASYKEGEDSFFPLSGSLIFGKQGTGRDNVDADKVMITNEEEIKTTNPVATESYGQVATNHQSAQAQAQTGWVQNQGILPGMVWQDRDVYLQGPIWAKIPHTDGNFHPSPLMGGFGMKHPPPQTLIKNTPVPADPPTAFNKDKLNSFITQYSTGQVSVEIEWELQKENSKRWNPEIQYTSNYYKSNNVEFAVNTEGVYSEPRPIGTRYLTRNL

SEQ ID NO: 334 - protein, 736 aa, Artificial Sequence
  Description of Artificial Sequence: Synthetic polypeptide
MAADGYLPDWLEDNLSEGIREWWALKPGAPQPKANQQHQDNARGLVLPGYKYLGPGNGLDKGEPVSAADAAALEHDKAYDQQLKAGDNPYLKYNHADAEFQERLKEDTSFGGNLGRAVFQAKKRLLEPLGLVEEAAKTAPGKKRPVEQSPQEPDSSAGIGKSGAQPAKKRLNFGQTGDTESVSDPQPIGEPPAAPSGVGSLTMASGGGAPVADNNEGADGVGSSSGNWHCDSQWLGDRVITTSTRTWALPTYNNHLYKQISNSTSGGSSNDNAYFGYSTPWGYFDFNRFHCHFSPRDWQRLINNNWGFRPKRLNFKLFNIQVKEVTDNNGVKTIANNLTSTVQVFTDSDYQLPYVLGSAHEGCLPPSPADVFMIPQYGYLTLNDGSQAVGRSSFYCLEYFPSQMLRTGNNFQFSYEFENVPFHSSYAHSQSLDRLMNPLIDQYLHYLSKTINGSGQNQQTLKFSVAGPSNMAVQGRNYIPGPSYRQQRVSTTVTQNNNSEFAWPGASSWALNGRNSLMNPGPAMASYKEGEDSFFPLSGSLIFGKQGTGRDDVDADKVIITNEEEIKTTNPVATESYGQVATNHQSAQAQAQTGWVQNQGILPGMVWQDRDVYLQGPIWAKIPHTDGNFHPSPLMGGFGMKHPPPQTLIKNTPVPADPPTAFNKDKLNSFITQYSTGQVSVEIEWELQKENSKRWNPEIQYTSNYYKSNNVEFAVNTEGVYSEPRPIGTRYLTRNL

SEQ ID NO: 335 - protein, 736 aa, Artificial Sequence
  Description of Artificial Sequence: Synthetic polypeptide
MAADGYLPDWLEDNLSEGIREWWALKPGAPQPKANQQHQDNARGLVLPGYKYLGPGNGLDKGEPVNAADAAALEHDKAYDQQLKAGDNPYLKYNHAGAEFQERLKEDTSFGGNLGRAVFQAKKRLLEPLGLVEEAAKTAPGKKRPVEQSPQEPDSSAGIGKSGAQPAKKRLNFGQTGDTESVPDPQPIGEPPAAPSGVGSLTMASGGGAPVADNNEGAGGVGSSSGNWHCDSQWLGDRVVTTSTRTWALPTYNNHLYKQISNSTSGGSSNDNAYFGYSTPWGYFDFNRFHCHFSPRDWQRLINNNWGFRPKRLNFKLFNIQVKEVTDNNGVKTIANNLTSTVQVFTDSDYQLPYVLGSAHGGCLPPFPADVFMIPQYGYLTLNDGSQAVGRSSFYCLEYFPSQMLRTGNNFQFSYEFENVPFHSSYAHSQSLDRLMNPLIDQYLHYLSKTINGSGQNQQTLKFSVAGPSNMAVQGRSYIPGPSYRQQRVSTTVTQNNNSEFAWPGASSWALNGRNSLMNPGPAMASYKEGEDSFFPLSGSLIFGKQGTGRDNVDADKVMITNEEEIKTTNPVATESYGQVATNHQSAQAQAQTGWVQNQGILPGMVWQDRDVYLQGPIWAKIPHTDGNFHPSPLMGGFGMKHPPPQTLIKNTPVPADPPTAFNKDKLNSFITQYSTGQVSVEIEWELQKENSKRWNPEIQYTSNYYKSNNVEFAVNTEGVYSEPRPIGTRYLTRNL

SEQ ID NO: 336 - protein, 736 aa, Artificial Sequence
  Description of Artificial Sequence: Synthetic polypeptide
MAADGYLPDWLEDNLSEGIREWWALKPGAPQPKANQQHQDNARGLVLPGYKYLGPGNGLDKGEPVNAADAAALEHDKAYDQQLKAGDNPYLKYNHADAEFQERLKEDTSFGGNLGRAVFQAKKRLLEPLGLVEEAAKTAPGKKRPVEQSPQEPDSSAGIGKSGAQPAKKRLNFGQTGDTESVPDPQPIGEPPAAPSGVGSLTMASGGGAPVADNNEGADGVGSSSGNWHCDSQWLGDRVVTTSTRTWALPTYNNHLYKQISNSTSGGSSNDNAYFGYSTPWGYFDFNRFHCHFSPRDWQRLINNNWGFRPKRLNFKLFNIQVKEVTDNNGVKTIANNLTSTVQVFTDSDYQLPYVLGSAHEGCLPPFPADVFMIPQYGYLTLNDGSQAVGRSSFYCLEYFPSQMLRTGNNFQFSYEFENVPFHSSHAHSQSLDRLMNPLIDQYLHYLSKTINGSGQNQQTLKFSVAGHSNMAVQGRNYIPGPSYRQQRVSTTVTQNNNSEFAWPGASSWALNGRNSLMNPGPAMASYKEGEDSFFPLSGSLIFGKQGTGRDNVDADKVMITNEEEIKTTNPVATESYGQVATNHQSAQAQAQTGWVQNQGILPGMVWQDRDVYLQGPIWAKIPHTDGNFHPSPLMGGFGMKHPPPQTLIKNTPVPADPPTAFNKDKLNSFITQYSTGQVSVEIGWELQKENSKRWNPEIQYTSNYYKSNNVEFAVNTEGVYSEPRPIGTRYLTRNL

SEQ ID NO: 337 - protein, 736 aa, Artificial Sequence
  Description of Artificial Sequence: Synthetic polypeptide
MAADGYLPDWLEDNLSEGIREWWALKPGAPQPKANQQHQDNARGLVLPGYKYLGPGNGLDKGEPVNAADAAALEHDKAYDQQLKAGDNPYLKYNHADAEFQERLKEDTSFGGNLGRAVFQAKKRLLEPLGLVEEAAKTAPGKKRPVEQSPQEPDSSAGIGKSGAQPAKKRLNFGQTGDTESVPDPQPIGEPPAAPSGVGSLTMASGGGAPVADNNEGADGVGSSSGNWHCDSQWLGDRVITTSTRTWALPTYNNRLYKQISNSTSGGSSNDNAYFGYSTPWGYFDFNRFHCHFSPRDWQRLINNNWGFRPKRLNFKPFNIQVKEVTDNNGVKTIANNLTSTVQVFTDSDYQLPYVLGSAHEGCLPPFPADVFMIPQYGYLTLNDGSQAVGRSSFYCLEYFPSQMLRTGNNFQFSYEFENVPFHSSYAHSQSLDRLMNPLIDQYLHYLSKTINGSGQNQQTLKFSVAGPSNMAVQGRNYIPGPSYRQQRVSTTVTQNNNSEFAWPGASSWALNGRNSLMNPGPAMASYKEGEDSFFPLSGSLIFGKQGTGRDNVDADKVMITNEEEIKTTNPVATESYGQVATNHQSAQAQAQTGWVQNQGILPGMVWQDRDVYLQGPIWAKIPHTDGNFHPSPLMGGFGMKHPPPQTLIKNTPVPADPPTAFNKDKLNSFITQYSTGQVSVEIEWELQKENSKRWNPEIQYTSNYYKSNNVEFAVNTEGVYSEPRPIGTRYLTRNL

SEQ ID NO: 338 - protein, 736 aa, Artificial Sequence
  Description of Artificial Sequence: Synthetic polypeptide
MAADGYLPDWLEDNLSEGIREWWALKPGAPQPKANQQHQDNARGLVLPGYKYLGPGNGLDKGEPVNAADAAALEHDKAYDQQLKAGDNPYLKYNHADAEFQERLKEDTSFGGNLGRAVFQAKKRLLEPLGLVEEAAKTAPGKKRPVEQSPQEPDSSAGIGKSGAQPAKKRLNFGQTGDTESVPDPQPIGEPPAAPSGVGSLTMASGGGAPVADNNEGADGVGSSSGNWHCDSQWLGDRVITTSTRTWALPTYNNHLYKQISNSTSGGSSNDNAYFGYSTPWGYFDFNRFHCHFSPRDWQRLINNNWGFRPKRLNFKLFNIQVKEVTDNNGVKTIANNLTSTVQVFTDSDYQLPYVLGSAHEGCLPPFPADVFMIPQYGYLTLNDGSQAVGRSSFYCLEYFPSQMLRTGNNFQFSYEFENVPFHSSYAHSQSLDRLMNPLIDQYLHYLSKTINGSGQNQQTLKFSVAGPSNMAVQGRNYIPGPSYRQQRVSTTVTQNNNSEFAWPGASSWALNGRNSLMNPGPAMASYKEGEDSFFPLSGSLIFGKQGTGRDNVDADKVMITNEEEIKTTNPVATESYGQVATNHQSAQAQAQTGWVQNQGILPGMVWQDRDVYLQGPIWAKIPHTDGNFHPSPLMGGFGMKHPPPQTLIKNTPVPADPPTAFNKDKLNSFITQYSTGQVSVEIEWELQKENSKRWNPEIQYTSNYYKSNNVEFAVNTEGVYSEPRPIGTRYLTRNL

SEQ ID NO: 339 - protein, 736 aa, Artificial Sequence
  Description of Artificial Sequence: Synthetic polypeptide
MAADGYLPDWLEDNLSEGIREWWALKPGAPQPKANQQHQDNARGLVLPGYKYLGPGNGLDKGEPVNAADAAALEHDKAYDQQLKAGDNPYLKYNHADAEFQERLKEDTSFGGNLGRAVFQAKKRLLEPLGLVEEAAKTAPGKKRPVEQSPQEPDSSAGIGKSGAQPAKKRLNFGQTGDTESVPDPQPIGEPPAAPSGVGSLTMASGGGAPVADNNEGADGVGSSSGNWHCDSQWLGDRVITTSTRTWALPTYNNHLYKQISNSTSGGSSNDNAYFGYSTPWGYFDFNRFHCHFSPRDWQRLINNNWGFRPKRLNFKLFNIQVKEVTDNNGVKTIANNLTSTVQVFTDSDYQLPYVLGSAHEGCLPPFPADVFMIPQYGYLTLNDGSQAVGRSSFYCLEYFPSQMLRTGNNFQFGYEFENVPFHSSYAHSQSLDRLMNPLIDQYLYYLSKTINGSGQNQQTLKFSVAGPSNMAVQGRNYIPGPSYRQQRVSTTVTQNNNSEFAWPGASSWALNGRNSLMNPGPAMASHKEGEDRFFPLSGSLIFGKQGTGRDNVDADKVMITNEEEIKTTNPVATESYGQVATNHQSAQAQAQTGWVQNQGILPGMVWQDRDVYLQGPIWAKIPHTDGNFHPSPLMGGFGMKHPPPQILIKNTPVPADPPTAFNKDKLNSFITQYSTGQVSVEIEWELQKENSKRWDPEIQYTSNYYKSNNVEFAVNTEGVYSEPRPIGTRYLTRNL

SEQ ID NO: 340 - protein, 736 aa, Artificial Sequence
  Description of Artificial Sequence: Synthetic polypeptide
MAADGYLPDWLEDNLSEGIREWWALKPGAPQPKANQQHQDNARGLVLPGYKYLGPGNGLDKGEPVNAADAAALEHDKAYDQQLKAGDNPYLKYNHADAEFQERLKEDTSFGGNLGRAVFQAKKRLLEPLGLVEEAAKTAPGKKRPVEQSPQEPDSSAGIGKSGAQPAKKRLNFGQTGDTESVPDPQPIGEPPAAPSGVGSLTMASGGGAPVADNNEGADGVGSSSGNWHCDSQWLGDRVITTSTRTWALPTYNNHLYKQISNSTSGGSSNDNAYFGYSTPWGYFDFNRFHCRFSPRDWQRLINNNWGFRPKRLNFKLFNIQVKEVTDNNGVKTIANNLTSTVQVFTDSDYQLPYVLGSAHEGCLPPFPADVFMIPQYGYLTLNDGSQAVGRSSFYCLEYFPSQMLRTGNNFQFSYEFENVPFHSSYAHSQSLDRLMNPLIDQYLYYLSKTINGSGQNQQTLKFSVAGPSNMAVQGRNYIPGPSYRQQRVSTTVTQNNNSEFAWPGASSWALNGRNSLMNPGPAMASHKEGEDRFFPLSGSLIFGKQGTGRDNVDADKVMITNEEEIKTTNPVATESYGQVATNHQSAQAQAQTGWVQNQGILPGMVWQDRDVYLQGPIWAKIPHTDGNFHPSPLMGGFGMKHPPPQILIKNAPVPADPPTAFNKDKLNSFITQYSTGQVSVEIEWELQKENSKRWNPEIQYTSNYYKSNNVEFAVNTEGVYSEPRPIGTRYLTRNL

SEQ ID NO: 341 - protein, 736 aa, Artificial Sequence
  Description of Artificial Sequence: Synthetic polypeptide
MAADGYLPDWLEDNLSEGIREWWALKPGAPQPKANQQHQDNARGLVLPGYKYLGPGNGLDKGEPVSAADAAALEHDKAYDQQLKAGDNPYLKYNHADAEFQERLKEDTSFGGNLGRAVFQAKKRLLEPLGLVEEAAKTAPGKKRPVEQSPQEPDSSAGIGKSGAQPAKKRLNFGQTGDTESVPDPQPIGEPPAAPSGVGSLTMASGGGAPVADNNEGADGVGSSSGNWHCDSQWLGDRVITTSTRTWALPTYNNHLYKQISNSTSGGSSNDNAYFGYSTPWGYFDFNRFHCHFSPRDWQRLINNNWGFRPKRLNFKLFNIQVKEVTDNNGVKTIANNLTSTVQVFTDSDYQLPYVLGSAHEGCLPPFPADVFMIPQYGYLTLNDGSQAVGRSSFYCLEYFPSQMLRTGNNFQFSYEFENVPFHSSYAHSQSLDRLMNPLIDQYLYYLSKTINGSGQNQQTLKFSVAGPSNMAVQGRNYIPGPSYRQQRVSTTVTQNNNSEFAWPGASSWALNGRNSLMNPGPAMASHKEGEDRFFPLSGSLIFGKQGTGRDNVDADKVMITNEEEIKTTNPVATESYGQVATNHQSAQAQAQTGWVQNQGILPGMVWQDRDVYLQGPIWAKIPHTDGNFHPSPLMGGFGMKHPPPQILIKNTPVPADPPTAFNKDKLNSFITQYSTGQVSVEIEWELQKENSKRWNPEIQYTSNYYKSNNVEFAVNTEGVYSEPRPIGTRYLTRNL

SEQ ID NO: 342 - protein, 736 aa, Artificial Sequence
  Description of Artificial Sequence: Synthetic polypeptide
MAADGYLPDWLEDNLSEGIREWWALKPGAPQPKANQQHQDNARGLVLPGYKYLGPGNGLDKGEPVNAADAAALEHDKAYDQQLKAGDNPYLKYNHADAEFQERLKEDTSFGGNLGRAVFQAKKRLLEPLGLVEEAAKTAPGKKRPVEQSPQEPDSSAGIGKSGAQPAKKRLNFGQTGDTESVPDPQPIGEPPAAPSGVGSLTMASGGGAPVADNNEGADGVGSSSGNWHCDSQWLGDRVITTSTRTWALPTYNNHLYKQISNSTSGGSSNDNAYFGYSTPWGYFDFNRFHCHFSPRDWQRLINNNWGFRPKRLNFKLFNIQVKEVTDNNGVKTIANNLTSTVQVFTDSDYQLPYVLGSAHEGCLPPFPADVFMIPQYGYLTLNDGSQAVGRSSFYCLEYFPSQMLRTGNNFQFSYEFENVPFHSSYAHSQSLDRLMNPLIDQYLYYLSKTINGSGQNQQTLKFSVAGPSNTAVQGRNYIPGPSYRQQRVSTTVTQNNNSEFAWPGASSWALNGRNSLMNPGPAMASHKEGEDRFFPLSGSLIFGKQGTGRDNVDADKVMITNEEEIKTTNPVATESYGQVATNHQSAQAQAQTGWVQNQGILPGMVWQDRDVYLQGPIWAKIPHTDGNFHPSPLMGGFGMKHPPPQILIKNTPVPADPPTAFNKDKLNSFITQYSTGQVSVEIEWELQKENSKRWNPEIQYTSNYYKSNNVEFAVNTEGVYSEPRPIGTRYLTRNL

SEQ ID NO: 343 - protein, 736 aa, Artificial Sequence
  Description of Artificial Sequence: Synthetic polypeptide
MAADGYLPDWLEDNLSEGIREWWALKPGAPQPKANQQHQDNARGLVLPGYKYLGPGNGLDKGEPVNAADAAALEHDKAYDQQLKAGDNPYLKYNHADAEFQERLKEDTSFGGNLGRAVFQAKKRLLEPLGLVEEAAKTAPGKKRPVEQSPQEPDSSAGIGKSGAQPAKKRLNFGQTGDTESVPDPQPIGEPPAAPSGVGSLTMASGGGAPVADNNEGADGVGSSSGNWHCDSQWLGDRVITTSTRTWALPTYNNHLYKQISNSTSGGSSNDNAYFGYSTPWGYFDFNRFHCHFSPRDWQRLINNNWGFRPKRLNFKLFNIQVKEVTDNNGVKTIANNLTSTVQVFTDSDYQLPYVLGSAHEGCLPPFPADVFMIPQYGYLTLNDGSQAVGRSSFYCLEYFPSQMLRTGSNFQFSYEFENVPFHSSYAHSQSLDRLMNPLIDQYLYYLSKTINGSGQNQQTLKFSVAGPSNMAVQGRNYIPGPSYRQQRVSTTVTQNNNSEFAWPGASSWALNGRNSLMNPGPAMASHKEGEDRFFPLSGSLIFGKQGTGRDNVDADKVMITNEEEIKTTNPAATESYGQVATNHQSAQAQAQTGWVQNQGILPGMVWQDRDVYLQGPIWAKIPHTDGNFHPSPLMGGFGMKHPPPQILIKNTPVPADPPTAFNKDKLNSFITQYSTGQVSVEIEWELQKENSKRWNPEIQHTSNYYKSNNVEFAVNTEGVYSEPRPIGTRYLTRNL

SEQ ID NO: 344 - protein, 736 aa, Artificial Sequence
  Description of Artificial Sequence: Synthetic polypeptide
MAADGYLPDWLEDNLSEGIREWWALKPGAPQPKANQQHQDNARGLVLPGYKYLGPGNGLDKGEPVNAADAAALEHDKAYDQQLKAGDNPYLKYNHADAEFQERLKEDTSFGGNLGRAVFQAKKRLLEPLGLVEEAAKTAPGKKRPVEQSPQEPDSSAGIGKSGAQPAKKRLNFGQTGDTESVPDPQPIGEPPAAPSGVGSLTMASGGGAPVADNNEGADGVGSSSGNWHCDSQWLGDRVITTSTRTWALPTYNNHLYKQISNSTSGGSSNDNAYFGYSTPWGYFDFNRFHCHFSPRDWQRLINNNWGFRPKRLNFRLFNIQVKEVTDNNGVKTIANNLTSTVQVFTDSDYQLPYVLGSAHEGCLPPFPADVFMIPQYGYLTLNDGSQAVGRSSFYCLEYFPSQMLRTGNNFQFSYEFENVPFHSSYAHSQSLDRLMNPLIDQYLYYLSKTINGSGQNQQTLKFSVAGPSNMAVQGRNYIPGPSYRQQRVSTTVTQNNNSEFAWPGASSWALNGRNSLMNPGPAMASHKEGEDRFFPLSGSLIFGKQGTGRDNVDADKVMITNEEEIKTTNPVATESYGQVATNHQSAQAQAQTGWVQSQGILPGMVWQDRDVYLQGPIWAKIPHTDGNFHPSPLMGGFGMKHPPPQILIKNTPVPADPPTAFNKDKLNSFITQYSTGQVSVEIEWELQKENSKRWNPEIQYTSNYYKSNNVEFAVNTEGVYSEPRPIGTRYLTRNL

SEQ ID NO: 345 - protein, 735 aa, Artificial Sequence
  Description of Artificial Sequence: Synthetic polypeptide
MAADGYLPDWLEDNLSEGIREWWALKPGAPQPKANQQHQDNARGLVLPGYKYLGPGNGLDKGEPVNAADAAALEHDKAYDQQLKAGDNPYLKYNHADAEFQERLKEDTSFGGNLGRAVFQAKKRLLEPLGLVEEAAKTAPGKKRPVEQSPQEPDSSAGIGKSGAQPAKKRLNFGQTGDTESVPDPQPIGEPPAAPSGVGSLTMASGGGAPVADNNEGADGVGSSSGNWHCDSQWLGDRVITTSTRTWALPTYNNHLYKQISNSTSGGSSNDNAYFGYSTPWRYFDFNRFHCHFSPRDWQRLINNWGFRPKRLNFKLFNIQVKEVTDNNGVKTIANNLTSTVQAFTDSDYQLPYVLGSAHEGCLPPFPADVFMIPQYGYLTLNDGSQAVGRSSFYCLEYFPSQMLRTGNNFQFSYEFENVPFHSSYAHSQSLDRLMNPLIDQYLYYLSKTINGSGQNQQTLKFSVAGPSNMAVQGRNYIPGPSYRQQRVSTTVTQNNNSEFAWPGASSWALNGRNSLMNPGPAMASHKEGEDRFFPLSGSLIFGKQGTGRDNVDADKVMITNEEEIKTTNPVATESYGQVATNHQSAQAQAQTGWVQNQGILPGMVWQDRDVYLQGPIWAKIPHTDGNFHPSPLMGGFGMKHPPPQILIKNTPVPADPPTAFNKDELNSFITQYSTGQVSVEIEWELQKENSKRWNPEIQYTSNYYKSNNVEFAVNTEGVYSEPRPIGTRYLTRNL

SEQ ID NO: 346 - protein, 735 aa, Artificial Sequence
  Description of Artificial Sequence: Synthetic polypeptide
MAADGYLPDWLEDNLSEGIREWWALKPGAPQPKANQQHQDNARGLVLPGYKYLGPGNGLDKGEPVNAADAAALEHDKAYDQQLKAGDNPYLKYNHADAEFQERLKEDTSFGGNLGRAVFQDKKRLLEPLGLVEEAAKTAPGKKRPVEQSPQEPDSSAGIGKSGAQPAKKRLNFGQTGDTESVPDPQPIGEPPAAPSGVGSLTMASGGGAPVADNNEGADGVGSSSGNWHCDSQWLGDRVITTSTRTWALPTYNNHLYKQISNSTSGGSSNDNAYFGYSTPWGYFDFNRFHCHFSPRDWQRLINNWGFRPKRLNFKLFNIQVKEVTDNNGVKTIANNLTSTVQVFTDSDYQLPYVLGSAHEGCLPPFPADVFMIPQYGYLTLNDGSQAVGRSSFYCLEYFPSQMLRTGNNFQFSYEFENVPFHSSYAHSQSLDRLMNPLIDQYLYYLSKTINGSGQNQQTLKFSVAGPSNMAVQGRNYIPGPSYRQQRVSTTVTQNNNSEFAWPGASSWALNGRNSLMNPGPAMASHKEGEDRFFPLSGSLIFGKQGTGRDNVDADKVMITNEEEIKTTNPVATESYGQVATNHQSAQAQAQTGWVQNQGILPGMVWQDRDVYLQGPIWAKIPHTDGNFHPSPLMGGFGMKHPPPQILIKNTPVPADPPTAFNKDKLNSFITQYSTGQVSVEIEWELQKENSKRWNPEIQYTSNYYKSNNVEFAVNTEGVYSEPRPIGTRYLTRNL

SEQ ID NO: 347 - protein, 736 aa, Artificial Sequence
  Description of Artificial Sequence: Synthetic polypeptide
MAADGYLPDWLEDNLSEGIREWWALKPGAPQPKANQQHQDNARGLVLPGYKYLGPGNGLDKGEPVNAADAAALEHDKAYDQQLKAGDNPYLKYNHADAEFQERLKEDTSFGGNLGRAVFQAKKRLLEPLGLVEEAAKTAPGKKRPVEQSPQEPDSSAGIGKSGAQPAKKRLNFGQTGDTESVPDPQPIGEPPAAPSGVGSLTMASGGGAPVADNNEGADGVGSSSGNWHCDSQWLGDRAITTSTRTWALPTYNNHLYKQISNSTSGGSSNDNAYFGYSTPWGYFDFNRFHCHFSPRDWQRLINNNWGFRPKRLNFKLFNIQVKEVTDNNGVKTIANNLTSTVQVFTDSDYQLPYVLGSAHEGCLPPFPADVFMIPQYGYLTLNDGSQAVGRSSFYCLEYFPSQMLRTGNNFQFSYEFENVPFHSSYAHSQSLDRLMNPLIDQYLYYLSKTINGSGQNQQTLKFSVAGPSNMAVQGRNYIPGPSYRQQRVSTTVTQNNNSEFAWPGASSWALNGRNSLMNPGPAMASHKEGEDRFFPLSGSLIFGKQGTGRDNVDADKVMTTNEEEIKTTNPVATESYGQVATNHQSAQAQAQTGWVQNQGILPGMVWQDRDVYLQGPIWAKIPHTDGNFHPSPLMGGFGMKHPPPQILIKNTPVPADPPTAFNKDKLNSFITQYSTGQVSVEIEWELQKENSKRWNPEIQYTSNYYKSNNVEFAVNTEGVYSEPRPIGTRYLTRNL

SEQ ID NO: 348 - protein, 736 aa, Artificial Sequence
  Description of Artificial Sequence: Synthetic polypeptide
MAADGYLPDWLEDNLSEGIREWWALKPGAPQPKANQQHQDNARGLVLPGYKYLGPGNGLDKGEPVNAADAAALVHDKAYDQQLKAGDNPYLKCNHADAEFQERLKEDTSFGGNLGRAVFQAKKRLLEPLGLVEEAAKTAPGKKRPVEQSPQEPDSSAGIGKSGAQPAKKRLNFGQTGDTESVPDPQPIGEPPAAPSGVGSLTMASGGGAPVADNNEGADGVGSSSGNWHCDSQWLGDRVITTSTRTWALPTYNNHLYKQISNSTSGGSSNDNAYLGYSTPWGYFDFNRFHCHFSPRDWQRLINNNWGFRPKRLNFKLFNIQVKEVTDNNGVKTIANNLTSTVQVFTDSDYQLPYVLGSAHEGCLPPFPADVFTIPQYGYLTLNDGSQAVGRSSFYCLEYFPSQMLRTGNNFQFSYEFENVPFHSSYAHSQSLDRLMNPLIDQYLYYLSKTINGSGQNQQTLKFSVAGPSNMAVQGRNYIPGPSYRQQRVSTTVTQNNNSEFAWPGASSWALNGRNSLMNPGPAMASHKEGEDRFFPLSGSLIFGKQGTGRDNVDADKVMITNEEEIKTTNPVATESYGQVATNHQSAQAQAQTGWVQNQGILPGMVWQDRDVYLQGPIWAKIPHTDGNFHPSPLMGGFGMKHPPPQILIKNTPVPADPPTAFNKDKLNSFITQYSTGQVSVEIEWELQKENSKRWNPEIQYTSNYYKSNNVEFAVNTEGVYSEPRPIGPRYLTRNF

SEQ ID NO: 349 - protein, 736 aa, Artificial Sequence
  Description of Artificial Sequence: Synthetic polypeptide
MAADGYLPDWLEDNLSEGIREWWALKPGAPQPKANQQHQDNARGLVLPGYKYLGPGNGLDKGEPVNAADAAALEHNKAYDQQLKAGDNPYLKCNHADAEFQERLKEDTSFGGNLGRAVFQAKKRLLEPLGLVEEAAKTAPGKKRPVEQSPQEPDSSAGIGKSGAQPAKKRLNFGQTGDTESVPDPQPIGEPPAAPSGVRSLTMASGGGAPVADNNEGADGVGSSSGNWHCDSQWLGDRVITTSTRTWALPTYNNHLYKQISNSTSGGSSNDNAYLGYSTPWGYFDFNRFHCHFSPRDWQRLINNNWGFRPKRLNFKLFNIQVKEVTDNNGVKTIANNLTSTVQVFTDSDYQLPYVLGSAHEGCLPPFPADVFMIPQYGYLTLNDGSQAVGRSSFYCLEYFPSQMLRTGNNFQFSYEFENVPFHSSYAHSQSLDRLMNPLIDQYLYYLSKTINGSGQNQQTLKFSVAGPSNMAVQGRNYIPGPSYRQQRVSTTVTQNNNSEFAWPGASSWALNGRNSLMNPGPAMASHKEGEDRFFPLSGSLIFGKQGTGRDNVDADKVMITNEEEIKTTNPVATESYGQVATNHQSAQAQAQTGWVQNQGILPGMVWQDRDVYLQGPIWAKIPHTDGNFHPSPLMGGFGMKHPPPQILIKNTPVPADPPTAFNKDKLNSFITQYSTGQVSVEIEWELQKENSKRWNPEIQYTSNYYKSNNVEFAVNTEGVYSEPRPIGTRYLTRNL

SEQ ID NO: 350 - protein, 736 aa, Artificial Sequence
  Description of Artificial Sequence: Synthetic polypeptide
MAADGYLPDWLEDNLSEGIREWWALKPGAPQPKANQQHQDNARGLVLPGYKYLGPGNGLDKGEPVNAADAAALEHDKAYDQQLKAGDNPYLKCNHADAEFQERLKEDTSFGGNLGRAVFQAKKRLLEPLGLVEEAAKTAPGKKRPVEQSPQEPDSSAGIGKSGAQPAKKRLNFGQTGDTESVPDPQPIGEPPAAPSGVGSLTMASGGGAPVADNNEGADGVGSSSGNWHCDSQWLGDRVITTSTRTWALPTYNNHLYKQISNSTSGGSSNDNAYLGYSTPWGYFDFNRFHCHFSPRDWQRLINNNWGFRPKRLNFELFNIQVKEVTDNNGVKTIANNLTSTVQVFTDSDYQLPYVLGSAHEGCLPPFPADVFMIPQYGYLTLNDGSQAVGRSSFYCLEYFPSQMLRTGNNFQSSYEFENVPFHSSYAHSQSLDRLMNPLIDQYLYYLSKTINGSGQNQQTLKFSVAGPSNMAVQGRNYIPGPSYRQQRASTTVTQNNNSEFAWPGASSWALNGRNSLMNPGPAMASHKEGEDRFFPLSGSLIFGKQGTGRDNVDADKVMITNEEEIKTTNPVATESYGQVATNHQSAQAQAQTGWVQNQGILPGMVWQDRDVYLQGPIWAKIPHTDGNFHPSPLMGGFGMKHPPPQILIKNTPVPADPPTAFNKDKLNSFITQYSTGQVSVEIEWELQKENSKRWNPEIQYTSNYYKSNNVEFAVNTEGVYSEPRPIGTRYLTRNL

SEQ ID NO: 351 - protein, 736 aa, Artificial Sequence
  Description of Artificial Sequence: Synthetic polypeptide
MAADGYLPDWLEDNLSEGIREWWALKPGAPQPKANQQHQDNARGLVLPGYKYLGPGNGLDKGEPVNAADAAALEHDKAYDQQLKAGDNPYLKCNHADAEFQERLKEDTSFGGNLGRAVFQAKKRLLEPLGLVEEAAKTAPGKKRPVEQSPQEPDSSAGIGKSGAQPAKKRLNFGQTGDTESVPDPQPIGEPPAAPPGVGSLTMASGGGAPVADNNEGADGVGSSSGNWHCDSQWLGDRVITTSTRTWALPTYNNHLYKQISNSTSGGSSNDNAYLGYSTPWGYFDFNRFHCHFSPRDWQRLINNNWGFRPKRLNFKLFNIQVKEVTDNNGVKTIANNLTSTVQVFTDSDYQLPYVLGSAHEGCLPPFPADVFMIPQYGYLTLNDGSQAVGRSSFYCLEYFPSQMLRTGNNFQFSYEFENVPFHSSYAHSQSLDRLMNPLIDQYLYYLSKTISGSGQNQQTLKFSVAGPSNMAVQGRNYIPGPSYRQQRVSTTVTQNNSSEFAWPGASSWALNGRNSLMNPGPAMASHKEGEDRFFPLSGSLIFGKQGTGRDNVDADKVMITNEEEIKTTNPVATESYGQVATNHQSAQAQAQTGWVQNQGILSGMVWQDRDVYLQGPIWAKIPHTDGNFHPSPLMGGFGMKHPPPQILIKNTPVPADPPTAFNKDKLNSFITQYSTGQVSVEIEWELQKENSKRWNPEIQYTSNYYKSNNVEFAVNTEGVYSEPRPIGTRYLTRNL

SEQ ID NO: 352 - protein, 736 aa, Artificial Sequence
  Description of Artificial Sequence: Synthetic polypeptide
MAADGYLPDWLEDNLSEGIREWWALKPGAPQPKANQQHQDNARGLVLPGYKYLGPGNGLDKGEPVNAADAAALEHDKAYDQQLKAGDNPYLKCNHADAEFQERLKEDTSFGGNLGRAVFQAKKRLLEPLGLVEEAAKTAPGKKRPVEQSPQEPDSSAGIGKSGAQPAKKRLNFGQTGDTESVPDPQPIGEPPAAPSGVGSLTMASGGGAPVADNNEGADGVGSSSGNWHCDSQWLGDRVITTSTRTWALPTYNNHLYKQISNSTSGGSSNDNAYLGYSTPWGYFDFNRFHCHFSPRDWQRLINNNWGFRPKRLNFKLFNIQVKEVTDNNGVKTIANNLTSTVQVFTDSDYQLPYVLGSAHEGCLPPFPADVFMIPQYGYLTLNDGSQAVGRSSFYCLEYFPSQMLRTGNNFQFSYEFENVPFHSSYAHSQSLDRLMNPLIDQYLYYLSKTINGSGQNQQTLKFSVAGPSNMAVQGRNYIPGPSYRQQRVSTTVTQNNNSEFAWPGASSWALNGRNSLMNPGPAMASHKEGEDRFFPLSGSLIFGKQGTGRDNVDADKVMITNEEEIKTTNPVATESYGQVATNHQSAQAQAQTGWVQNQGILPGMVWQDRDVYLQGPIWAKIPHTDGNFHPSPLMGGFGMKHPPPQILIKNTPVPADPPTAFNKDKLNSFITQYSTGQVSVEIEWELQKENSKRWNPEIQYTSNYYKSNNVEFAVNTEGVYSEPRPIGTRYLTRNL

SEQ ID NO: 353 - protein, 736 aa, Artificial Sequence
  Description of Artificial Sequence: Synthetic polypeptide
MAADGYLPDWLEDNLSEGIREWWALKPGAPQPKANQQHQDNARGLVLPGYKYLGPGNGLDKGEPVNAADAAALEHDKAYDQQLKAGDNPYLKCNHADAEFQERLKEDTSFGGNLGRAVFQAKKRLLEPLGLVEEAAKTAPGKKRPVEQSPQEPDSSAGIGKSGAQPAKKRLNFGQTGDTESVPDPQPIGEPPAAPSGVGSLTMASGGGAPVADNNEGADGVGSSSGNWHCDSQWLGDRVITTSTRTWALPTYNNHLYKQISNSTSGGSSNDNAYLDYSTPWGYFDFNRFHCHFSPRDWQRLINNNWGFRPKRLNFKLFNIQVKEVTDNNGVKTIANNLTSTVQVFTDSDYQLPYVLGSAHEGCLPPFPADVFMIPQYGYLTLNDGSQAVGRSSFYCLEYFPSQMLRTGNNFQFSYEFENVPFHSSYAHSQSLDRLMNPLIDQYLYYLSKTINGSGQNQQTLKFSVAGPSNMAVQGRNYIPGPSYRQQRVSTTVTQNNNSEFAWPGASSWALNGRNSLMNPGPAMASHKEGEDRFFPLSGSLIFGKQGTGRDNVDADKVMITNEEEIKTTNPVATESYGQVATNHQSAQAQAQTGWVQNQGILPGMVWQGRDVYLQGPIWAKIPHTDGNFHPSPLMGGFGMKHPPPQILIKNTPVPADPPTAFNKDKLNSFITQYSTGQVSVEIEWELQKENSKRWNPEIQYTSNYYKSNNVEFAVNTEGVYSEPRPIGTRYLTRNL

SEQ ID NO: 354 - protein, 736 aa, Artificial Sequence
  Description of Artificial Sequence: Synthetic polypeptide
MAADGYLPDWLEDNLSEGIREWWALKPGAPQPKANQQHQDNARGLVLPGYKYLGPGNGLDKGEPVNAADAAALEHDKAYDQQLKAGDNPYLKYNHADAEFQERLKEDTSFGGNLGRAVFQTKKRLLEPLGLVEEAAKTAPGKKRPVEQSPQEPGSSAGIGKSGAQPAKKRLNFGQTGDTESVPDPQPIGEPPAAPSGVGSLTMASGGGAPVADNNEGADGVGSSSGNWHCDSQWLGDRVITTSTRTWALPTYNNHLYKQISNSTSGGSSNDNAYFGYSTPWGYFDFNRFHCHFSPRDWQRLINNNWGFRPKRLNFKLFNIQVKEVTDNNGVKTIANNLTSTVQVFTDSDYQLPYVLGSAHEGCLPPFPADVFMIPQYGYLTLNDGSQAVGRSSFYCLEYFPSQMLRTGNNFQFSYEFENVPFHSSYAHSQSLDRLMNPLIDQYLHYLSKTINGSGQNQQTLKFSVAGPSNMAVQGRNYIPGPSYRQQRVSTTVTQNNNSEFAWPGASSWALNGRNSLMNPGPAMASHKEGEDRFFPLSGSLIFGKQGTGRDNVDADKVMITNEEEIKTTNPVATESYGQVATNHQSAQAQAQTGWVQNQGILPGMVWQDRDVYLQGPIWAKIPHTDGNFHPSPLMGGFGMKHPPPQILIKNTPVPADPPTAFNKDKLNSFITQYSTGQVSVEIEWELQKENSKRWNPEIQYTSNYYKSNNVEFAVNTEGVYSEPRPIGTRYLTRNL

SEQ ID NO: 355 - protein, 736 aa, Artificial Sequence
  Description of Artificial Sequence: Synthetic polypeptide
MAADGYFPDWLEDNLSEGIREWWALKPGAPQPKANQQHQDNARGLVLPGYKYLGPGNGLDKGEPVNAADAAALEHDKAYDQQLKAGDNPYLKYNHADAEFQERLKEDTSFGGNLGRAVFQAKKRLLEPLGLVEEAAKTAPGKKRPVEQSPQEPDSSAGIGKSGAQPAKKRLNFGQTGDTESVPDPQPIGESPAAPSGVGSLTMASGGGAPVADNNEGADGVGSSSGNWHCDSQWLGDRVITTSTRTWALPTYNNHLYKQISNSTSGGSSNDNAYFGYSTPWGYFDFNRFHCHFSPRDWQRLINNNWGFRPKRLNFKLFNIQVKEVTDNNGVKTIANNLTSTVQVFTDSDYQLPYVLGSAHEGCLPPFPADVFMIPQYGYLTLNDGSQAVGRSSFYCLEYLPSQMLRTGNNFQFSYEFENVPFHSSYAHSQSLDRLMNPLIDQYLHYLSKTINGSGQNQQTLKFSVAGPSNMAVQGRNYIPGPSYRQQRVSTTVTQNNNSEFAWPGASSWALNGRNSLMNPGPAVASHKEGEDRFFPLSGSLIFGKQGTGRDNVDADKVMITNEEEIKTTNPVATESYGQVATNHQSAQAQAQTGWVQNQGILPGMVWQDRDVYLQGPIWAKIPHTDGNFHPSPLMGGFGMKHPPPQILIKNTPVPADPPTAFNKDKLNSFITQYSTGQVSVEIEWELQKENSKRWNPEIQYTSNYYKSNNVEFAVNTEGVYSEPRPIGTRYLTRNL

SEQ ID NO: 356 - protein, 736 aa, Artificial Sequence
  Description of Artificial Sequence: Synthetic polypeptide
MAADGYLPDWLEDNLSEGIREWWALKPGAPQPKANQQHQDNARGLVLPGYKYLGPGNGLDKGEPVNAADAAALEHDKAYDQQLKAGDNPYLKYNHADAEFQERLKEDTSFGGNLGRAVFQAKKRLLEPLGPVEEAAKTAPGKKRPVEQSPQEPDSSAGIGKSGAQPAKKRLNFGQTGDTESVPDPQPIGEPPAAPSGVGSLTMASGGGAPVADNNEGADGVGSSSGNWHCDSQWLGDRVITTSTRTWALPTYNNHLYKQISNSTSGGSSNDNAYFGYSTPWGYFDFNRFHCHFSPRDWQRLINNNWGFRPKRLNFKLFNIQVKEVTDNNGVKTIANNLTSTVQVFTDSDYQLPYVLGSAHEGCLPPFPADVFMIPQYGYLTLNDGSQAVGRSSFYCLEYFPSQMLRTGNNFQFSYEFENVPFHSSYAHSQSLDRLMNPLIDQYLYYLSKTINGSGQNQQTLKFSVAGPSNMAVQGRNYIPGPSYRQQRVSTTVTQNNNSEFAWPGASSWALNGRNSLMNPGPAMASHKEGEDRFFPLSGSLIFGKQGTGRDNVDADKVMITNEEEIKTTNPVATESYGQAATNHQSAQAQAQTGWVQNQGILPGMVWQDRDVYLQGPIWAKIPHTDGNFHPSPLMGGFGMKHPPPQILIKNTPVPADPPTAFNKDKLNSFITQYSTGQVSVEIEWELQKENSKRWNPEIQYTSNYYKSNNVEFAVNTEGVYSEPRPIGTRYLTRNL

SEQ ID NO: 357 - protein, 736 aa, Artificial Sequence
  Description of Artificial Sequence: Synthetic polypeptide
MAADGYLPDWLEDNLSEGIREWWALKPGAPQPKANQQHQDNARGLVLPGYKYLGPGNGLDKGEPVNAADAAALEHDKAYDQQLKAGDNPYLKYNHADAEFQERLKEDTSFGGNLGRAVFQAKKRLLEPLGPVEEAAKTAPGKKRPVEQSPQEPDSSAGIGKSGAQPAKKRLNFGQTGDTESVPDPQPIGEPPAAPSGVGSLTMASGGGAPVADNNEGADGVGSSSGNWHCDSQWLGDRVITTSTRTWALPTYNNHLYKQISNSTSGGSSNDNAYFGYSTPWGYFDFNRFHCHFSPRDWRRLINNNWGFRPKRLNFKLFNIQVKEVTDNNGVKTIANNLTSTVQVFTDSDYQLPYVLGSAHEGCLPPFPADVFMIPQYGYLTLNDGSQAVGRSSFYCLEYFPSQMLRTGNNFQFSYEFENVPFHSSYAHSQSLDRLMNPLIDQYLYYLSKTINGSGQNQQTLKFSVAGPSNMAVQGRNYIPGPSYRQQRVSTTVTQNNNSEFAWPGASSWALNGRNSLMNPGPAMASHKEGEDRFFPLSGSLIFGKQGTGRDNVDADKVMITNEEEIKTTNPVATESYGQVATNHQSAQAQAQTGWVQNQGILPGMVWQDRDVYLQGPIWAKIPHTDGNFHPSPLMGGFGMKHPPPQILIKNTPVPADPPTAFNKDKLNSFITQYSTGQVSVEIEWELQKENSKRWNPEIQYTSNYYKSNNVEFAVNTEGVYSEPRPIGTRYLTRNL

SEQ ID NO: 358 - protein, 736 aa, Artificial Sequence
  Description of Artificial Sequence: Synthetic polypeptide
MAADGYLPDWLEDNLSEGIREWWALKPGAPQPKANQQHQDNARGLVLPGYKYLGPGNGLDKGEPVNAADAAALEHDKAYDQQLKAGDNLYLKYNHADAEFQERLKEDTSFGGNLGRAVFQAKKRLLEPLGLVEEAAKTAPGKKRPVEQSPQEPDSSAGIGKSGAQPAKKRLNFGQTGDTESVPDPQPIGEPPAAPSGVGSLTMASGGGAPVADNNEGADGVGSSSGNWHCDSQWLGDRVITTSTRTWALPTYNNHLYKQISNSTSGGSSNDNAYFGYSTPWGYFDFNRFHCHFSPRDWQRLINNNWGFRPKRLNFKLFNIQVKEVTDNNGVKTIANNLTSTVQVFTDSDYQLPYVLGSAHEGCLPPFPADVFMIPQYGYLTLNDGSQAVGRSSFYCLEYFPSQMLRTGNNFQFSYEFENVPFHSSYAHSQSLDRLMNPLIDQYLHYLSKTINGSGQNQQTLKFSVAGPSNMAVQGRNYIPGPSYRQQRVSTTVTQNNNSEFAWPGASSWALNGRNSLMNPGPAMASHKEGEDRFFPLSGSLIFGKQGTGRDNVDADKVMITNEEEIKTTNPVATESYGQVATNHQSAQAQAQTGWVQNQGILPGMVWQDRDVYLQGPIWAKIPHTDGNFHPSPLMGGFGMKHPPPQILIKNTPVPADPPTAFNKDKLNSFITQYSTGQVSVEIEWELQKENSKRWNPEIQYTSNYYKSNNVEFAVNTEGVYSEPRPIGTRYLTRNL

SEQ ID NO: 359 - protein, 736 aa, Artificial Sequence
  Description of Artificial Sequence: Synthetic polypeptide
MAADGYLPDWLEDNLSEGIREWWALKPGAPQPKANQQHQDNARGLVLPGYKYLGPGNGLDKGEPVNAADAAALEHDKAYDQQLKAGDNPYLKYNHADAEFQERLKEDTSFGGNLGRAVFQAKKRLLEPLGLVEEAAKTAPGKKRPVEQSPQEPDSSAGIGKSGAQPAKKRLNFGQTGDTESVPDPQPIGEPPAAPSGVGSLTMASGGGAPVADNNEGADGVGSSSGNWHCDSQWLGDRVITTSTRTWALPTYNNHLYKQISNSTSGGSSNDNAYFGYSTPWGYFDFNRFHCHFSPRDWQRLINNNWGFRPKRLNFKLFNIQVKEVTDNNGVKTIANNLTSTVQVFTDSDYQLPYVLGSAHEGCLPPFPADVFMIPQYGYLTLNDGSQAVGRSSFYCLEYFPSQMLRTGNNFQFSYEFENVPFHSSYAHSQSLDRLMNPLIDQYLHYLSKTINGSGQNQQTLKFSVAGPSNMAVQGRNYIPGPSYRQQRVSTTVTQNNNSEFAWPGASSWALNGRNSLMNPGPAMASHKEGEDRFFPLSGSLIFGKQGTGRDNVDADKVMITNEEEIKTTNPVATESYGQVATNHQSAQAQAQTGWVQNQGILPGMVWQDRDVYLQGPIWAKIPHTDGNFHPSPLMGGFGMKHPPPQILIKNTPVPADPPTAFNKDKLNSFITQYSTGQVSVEIEWELQKENSKRWNPEIQYTSNYYKSNNVEFAVNTEGVYSEPRPIGTRYLTRNL

SEQ ID NO: 360 - protein, 736 aa, Artificial Sequence
  Description of Artificial Sequence: Synthetic polypeptide
  MOD_RES (442)..(442): Any amino acid
MAADGYLPDWLEDNLSEGIREWWALKPGAPQPKANQQHQDNARGLVLPGYKYLGPGNGLDKGEPVNAADAAALEHDKAYDQQLKAGDNPYLKYNHADAEFQERLKEDTSFGGNLGRAVFQAKKRLLEPLGLVEEAAKTAPGKKRPVEQSPQEPDSSAGIGKSGAQPAKKRLNFGQTGDTESVPDPQPIGEPPAAPSGVGSLTMASGGGAPVADNNEGADGVGSSSGNWHCDSQWLGDRVITTSTRTWALPTYNNHLYKQISTSTSGGSSNDNAYFGYSTPWGYFDFNRFHCHFSPRDWQRLINNNWGFRPKRLNFKLFNIQVKEVTDNNGVKTIANNLTSTVQVFTDSDYQLPYVLGSAHEGCLPPFPADVFMIPQYGYLTLNDGSQAVGRSSFYCLEYFPSQMLRTGNNFQFSYEFENVPFHSSYAHSQSLDRLMNPLIDXYLHYLSKTINGSGQNQQTLKFSVAGPSNMAVQGRNYIPGPSYRQQRVSTTVTQNNNSEFAWPGASSWALNGRNSLMNPGPAMASHKEGEDRFFPLSGSLIFGKQGTGRDNVDADKVMITNEEEIKTTNPVATESYGQVATNHQSAQAQAQTGWVQNQGILPDMVWQDRDVYLQGPIWAKIPHTDGNFHPSPLMGGFGMKHPPPQILIKNTPVPADPPTAFNKDKLNSFITQYSTGQVSVEIEWELQKENSKRWNPEIQYTSNYYKSNNVEFAVNTEGVYSEPRPIGTRYLTRNL

SEQ ID NO: 361 - protein, 736 aa, Artificial Sequence
  Description of Artificial Sequence: Synthetic polypeptide
MAADGYLPDWLEDNLSEGIREWWALKPGAPQPRANQQHQDNARGLVLPGYKYLGPGNGLDKGEPVNAADAAALEHDKAYDQQLKAGDNPYLKYNHADAEFQERLKEDTSFGGNLGRAVFQAKKRLLEPLGLVEEAAKTAPGKKRPVEQSPQEPDSSAGIGKSGAQPAKKRLNFGQTGDTESVPDPQPIGEPPAAPSGVGSLTMASGGGAPVADNNEGADGVGSSSGNWHCDSQWLGDRVITTSTRTWALPTYNNHLYKQISNSTSGGSSNDNAYFGYSTPWGYFDFNRFHCHFSPRDWQRLINNNWGFRPKRLNFKLFNIQVKEVTDNNGVKTIANNLTSTVQVFTDSDCQLPYVLGSAHEGCLPPFPADVFMIPQYGYLTLNDGSQAVGRSSFYCLEYFPSQMLRTGNNFQFSYEFENVPFHSSYAHSQSLDRLTNPLIDQYLYYLSKTINGSGQNQQTLKFSVAGPSNMAVQGRNYIPGPSYRQQRVSTTVTQNNNSEFAWPGASSWALNGRNSLMNPGPAMASHKEGEDRFFPLSGSLIFGKQGTGRDNVDADKVMITNEEEIKTTNPVATESHGQVATNHQSAQAQAQTGWVQNQGILPGMVWQDRDVYLQGPIWAKIPHTDGNFHPSPLMGGFGMKHPPPQILIKNTPVPADPPTAFNKDKLNSFITQYSTGQVSVEIEWELQKENSKRWNPEIQYTSNYYKSNNVEFAVNTEGVYSEPRPIGTRYLTRNL

SEQ ID NO: 362 - protein, 736 aa, Artificial Sequence
  Description of Artificial Sequence: Synthetic polypeptide
MAADGYLPDWLEDNLSEGIREWWALKPGAPQPKANQQHQDNARGLVLPGYKYLGPGNGLDKGEPVNAADAAALEHDKAYDQQLKAGDNPYLKYNHADAEFQERLKEDTSFGGNLGRAVFQAKKRLLEPLGLVEEAAKTAPGKKRPVEQSPQEPDSSAGIGKSGAQPAKKRLNFGQTGDTESVPDPQPIGEPPAAPSGVGSLTMASGGGAPVADNNEGADGVGSSSGNWHCDSQWLGDRVITTSTRTWALPTYNNHLYKQISNSTSGGSSNDNAYFGYSTPWGYFDFNRFHCHFSPRDWQRLINNNWGFRPKRLNFKLFNIQVKEVTDNNGVKTIANNLTSTVQVFTDSDYQLPYVLGSAHEGCLPPFPADVFMIPQYGYLTLNDGSQAVGRSSFYCLEYFPSQMLRTGNNFQFSYEFENVPFHSSYAHSQSLDRLMNPPIDQYLYYLSKTINGSGQNQQTLKFSVAGPSNMAVQGRNYIPGPSYRQQRVSTTVTQNNNSEFAWPGASSWALNGRNSLMNPGPAMASHKEGEDRFFPLSGSLIFGKQGTGRDNVDADKVMITNEEEIKTTNPVATESYGQVATNHQSAQAQAQTGWVQNQGILPGMVWQDRDVYLQGPIWAKIPHTDGNFHPSPLMGGFGMKHPPPQILIKNTPVPADPPTAFNKDKLNSFITQYSTGQVSVEIEWELQKENSKRWNPEIQYTSNYYKSNNVEFAVNTEGVYGEPRPIGTRYLTRNL

SEQ ID NO: 363 - protein, 736 aa, Artificial Sequence
  Description of Artificial Sequence: Synthetic polypeptide
MAADGYLPDWLEDNLSEGIREWWALKPGAPQPKANQQHQDNARGLVLPGYKYLGPGNGLDKGEPVNAADAAALEHDKAYDQQLKAGDNPYLKYNHADAEFQERLKEDTSFGGNLGRAVFQAKKRLLEPLGLVEEAAKTAPGKKRPVEQSPQEPDSSAGIGKSGAQPAKKRLNFGQTGDTESVPDPQPIGEPPAAPSGVGSLTMASGGGAPVADNNEGADGVGSSSGNWHCDSQWLGDRVITTSTRTWALPTYNNHLYKQISNSTSGGSSNDNAYFGYSTPWGYFDFNRFHCHFSPRDRQRLINNNWGFRPKRLNFKLFNIQVKEVTDNNGVKTIANNLTSTVQVFTDSDYQLPYVLGSAHEGCLPPFPADVFMIPQYGYLTLNDGSQAVGRSSFYCLEYFPSQMLRTGNNFQFSYEFENVPFHSSYAHSQSLDRLMNPLIDQYLYYLSKTINGSGQNQQTLKFSVAGPSNMAVQGRNYIPGPSYRQQRVSTTVTQNNNSEFAWPGASSWALNGRNSLMNPGPAMASHKEGEDRFFPLSGSLIFGKQGTGRDNVDADKVMITNEEEIKTTNPVATESYGQVATNHQSAQAQAQTGWVQNQGILPGMVWQDRDVYLQGPIWAKIPHTDGNFHPSPLMGGFGMKHPPPQILIKNTPVPADPPTAFNKDKLNSFITQYSTGQVSVEIEWELQKENSKRWNPEIQYTSNYYKSNNVEFAVNTEGVYSEPRPIGTRYLTRNL

SEQ ID NO: 364 - protein, 736 aa, Artificial Sequence
  Description of Artificial Sequence: Synthetic polypeptide
MAADGYLPDWLEDNLSEGIREWWALKPGAPQPKANQQHQDNARGLVLPGYKYLGPGNGLDKGEPVNAADAAALEHDKAYDQQLKAGDNPYLKYNHADAEFQERLKEDTSFGGNLGRAVFQAKKRLLEPLGLVEEAAKTAPGKKRPVEQSPQEPDSSAGIGKSGAQPAKKRLNFGQTGDTESVPDPQPIGEPPAAPSGVGSLTMASGGGAPVADNNEGADGVGSSSGNWHCNSQWLGDRVITTSTRTWALPTYNNHLYKQISNSTSGGSSNDNAYFGYSTPWGYFDFNRFHCHFSPRDWQRLINNNWGFRPKRLNFKLFNIQVKEVTDNNGVKTIANNLTSTVQVFTDSDYQLPYVLGSAHEGCLPPFPADVFMIPQYGYLTLNDGSQAVGRSSFYCLEYFPSQMLRTGNNFQFSYEFENVPFHSSYAHSQSLDRLMNPLIDQYLYYLSKTINGSGQNQQTLKFSVAGPGNMAVQGRNYIPGPSYRQQRVSTTVTQNNNSEFAWPGASSWALNGRNSLMNPGPAMASHKEGEDRFFPLSGSLIFGKQGTGRDNVDADKVMITNEEEIKTTNPVATESYGQVATNHQSAQAQAQTGWVQNQGILPGMVWQDRDVYLQGPIWAKIPHTDGNFHPSPLMGGFGMKHPPPQILIKNTPVPADPPTAFNKDKLNSFITQYSTGQVSVEIEWELQKENSKRWNPEIQYTSNYYKSNNVEFAVNTEGVYSEPRPIGTRYLTRNL

SEQ ID NO: 365 - protein, 736 aa, Artificial Sequence
  Description of Artificial Sequence: Synthetic polypeptide
MAADGYLPDWLEDNLSEGIREWWALKPGAPQPKANQQHQDNARGLVLPGYRYLGPGNGLDKGEPVNAADAAALEHDKAYDQQLKAGDNPYLKYNHADAEFQERLKEDTSFGGNLGRAVFQAKKRLLEPLGLVEEAAKTAPGKKRPVEQSPQEPDSSAGIGKSGAQPAKKRLNFGQTGDTESVPDPQPIGEPPAAPSGVGSLTMASGGGAPVADNNEGADGVGSSSGNWHCDSQWLGDRVITTSTRTWALPTYNNHLYKQISNSTSGGSSNDNAYFGYSTPWGYFDFNRFHCHFSPRDWQRLINNNWGFRPKRLNFKLFNIQVKEVTDNNGVKTVANNLTSTVQVFTDSDYQLPYVLGSAHEGCLPPFPADVFMIPQYGYLTLNDGSQAVGRSSFYCLEYFPSQMLRTGNNFQFSYEFENVPFHSSYAHSQSLDRLMNPLIDQYLYYLSKTINGSGQNQQTLKFSVAGPSNMAVQGRNYIPGPSYRQQRVSTTVTQNNNSEFAWPGASSWALNGRNSLMNPGPAMASHKEGEDRFFPLSGSLIFGKQGTGRDNVDADKVMITNEEEIKTTNPVATESYGQVATNHQSAQAQAQTGWVQNQGILPGMVWQDRDVYLQGPIWAKIPHTDGNFHPSPLMGGFGMKHPPPQILIKNTPVPADPPTAFNKDKLNSFITQYSTGQVSVEIEWELQKENSKRWNPEIQYTSNYYKSNNVEFAVNTEGVYSGPRPIGTRYLTRNL

SEQ ID NO: 366 - protein, 736 aa, Artificial Sequence
  Description of Artificial Sequence: Synthetic polypeptide
MAADGYLPDWLEDNLSEGIREWWALKPGAPQPKANQQRQDNARGLVLPGYKYLGPGNGLDKGEPVNAADAAALEHDKAYDQQLKAGGNPCLKYNHADAEFQERLKEDTSFGGNLGRAVFQAKKRLLEPLGLVEEAAKTAPGKKRPVEQSPQEPDSSAGIGRSGAQPAKKRLNFGQTGDTESVPDPQPIGEPPAAPSGVGSLTMASGGGAPVADNNEGADGVGSSSGNWHCDSQWLGDRVITTSTRTWALPTYNNHLYKQISNSTSGGSSNDNAYFGYSTPWGYFDFNRFHCHFSPRDWQRLINNNWGFRPKRLNFKLFNIQVKEVTDNNGVKAIANNLTSTVQVFTDSDYQLPYVLGSAHEGCLPPFPADVFMIPQYGYLTLNDGSQAVGRSSFYCLEYFPSQMLRTGNNFQFSYEFENVPFHSSYAHSQSLDRLMNPLIDQYLYYLSKTIDGSGQNQQTLKFSVAGPSNMAVQGRNYIPGPSYRQQRVSTTVTQNNNSEFAWPGASSWALNGRNSLMDPGPAMASHKEGEDRFFPLSGSLIFGKQGTGRDNVDADKVMITNEEEIKTTNPVATESYGQVATNHQSAQAQAQTGWVQNQGILPGMVWQDRDVYLQGPIWAKIPHTGGNFHPSPLMGGFGMKHPPPQILIKNTPVPADPPTAFNKDKLNSFITQYSTGQVSVEIEWELQKENSKRWNPEIQYTSNYYKSNNVEFAVNTEGVYSEPRPIGTRYLTRNL

SEQ ID NO: 367 - protein, 736 aa, Artificial Sequence
  Description of Artificial Sequence: Synthetic polypeptide
MAADGYLPDWLEDNLSEGIREWWALKPGAPQPKANQQHQDNARGLVLPGYKYLGPGNGLDKGEPVNAADAAALEHDKAYDQQLKAGDNPYLKYNHADAEFQERLKEDTSFGGNLGRAVFQAKKRLLEPLGLVEEAAKTAPGKKRPVEQSPQEPDSSAGIGKSGAQPAKKRLNFGQTGDTESVPDPQPIGEPPAAPSGVGSLTMASGGGAPVADNNEGADGVGSSSGNWHCDSQWLGDRVITTSTRTWALPTYNNHLYKQISNSTSGGSSNDNAYFGYSTPWGYFDFNRFHCHFSPRDWQRLINNNWGFRPKRLNFKLFNIQVKEVTDNNGVKTIANNLTSTVQVFTDSDYQLPYVLGSAHEGCLPPFPADVFMIPQYGYLTLNDGSQAVGRSSFYCLEYFPSQMLRTGNNFQFSYEFENVPFHSSYAHSQSLDRLMNPLIDQYLYYLSKTINGSGQNQQTLKFSVAGPSNMAVQGRNYIPGPSYRQQRVSTTVTQNNNSEFAWPGASSWALNGRNSLMNPGPAMASHKEGEDRFFPLSGSLIFGKQGTGRDNVDADKVMITNEEEIKTTNPVATESYGQVATNHQSAQAQAQTGWVQNQGILPGMVWQDRDVYLQGPIWAKIPHTDGNFHPSPLMGGFGMKHPPPQILIKNTPVPADPPTAFNKDKLNSFITQYSTGQVSVEIEWELQKENSKRWNPEIQYTSNYYKPNNVEFAVNTEGVYSEPRPIGTRYLTRNL

SEQ ID NO: 368 - protein, 736 aa, Artificial Sequence
  Description of Artificial Sequence: Synthetic polypeptide
MAADGYLPDWLEDNLSEGIREWWALKPGAPQPKANQQHQDNARGLVLPGYKYLGPGNGLDKGEPVNAADAAALEHNKAYDQQLKAGDNPYLKCNHADAEFQERLKEDTSFGGNLGRAVFQAKKRPLEPLGLVEEAAKTAPGKKRPVEQSPQEPDSSAGIGKSGAQPAKKRLNFGQTGDTESVPDPQPIGEPPAAPSGVRSLTMASGGGAPVADNNEGADGVGSSSGNWHCDSQWLGDRVITTSTRTWALPTYNNHLYKQISNSTSGGSSNDNAYLGYSTPWGYFDFNRFHCHFSPRDWQRLINNNWGFRPKRLNFKLFNIQVKEVTDNNGVKTIANNLTSTVQVFTDSDYQLPYVLGSAHEGCLPPFPADVFMIPQYGYLTLNDGSQAVGRSSFYCLEYFPSQMLRTGNNFQFSYEFENVPFHSSYAHSQSLDRLMNPLIDQYLYYLSKTINGSGQNQQTLKFSVAGPSNMAVQGRNYIPGPSYRQQRVSTTVTQNNNSEFAWPGASSWALNGRNSLMNPGPTMASHKEGEDRFFPLSGSLIFGKQGTGRDNVDADKVMITNEEEIKTTNPVATESYGQVATNHQSAQAQAQTGWVQNQGILPGMVWQDRDVYLQGPIWAKIPHTDGNFHPSPLMGGFGMKHPPPQILIKNTPVPADPPTAFNKDKLNSFITQYSTGQVSVEIEWELQKENSKRWNPEIQYTSNYYKSNNVEFAVNTEGVYSEPRPIGTRYLTRNL

SEQ ID NO: 369 - protein, 736 aa, Artificial Sequence
  Description of Artificial Sequence: Synthetic polypeptide
MAADGYPPDWLEDNLSEGIREWWALKPGAPQPKANQQHQDNARGLVLPGYKYLGPGNGLDKGEPVNAADAAALEHDKAYDQQLKAGDNPHLKYNHADAEFQERLKEDTSFGGNLGRAVFQAKKRLLEPLGLVEEAAKTAPGKKRPVEQSPQEPDSSAGIGKSGAQPAKKRLNFGQTGDTESVPDPQPIGEPPAAPSGVGSLTMASGGGAPVADNNEGADGVGSSSGNWHCDSQWLGDRVITTSTRTWALPTYNNHLYKQISNSTSGGSSNDNAYFGYSTPWGYFDFNRFHCHFSPRDWQRLINNNWGFRPKRLNFKLFNIQVKEVTDNNGVKTIANNLTSTVQVFTDSDYQLPYVLGSAHEGCLPPFPADVFMIPQYGYLTLNDGSQAVGRSSFYCLEYFPSQMLRTGNNFQFSYEFENVPFHSSYAHSQSLDRLMNPLIDQYLYYLSKTINGSGQNQQTLKFSVAGPSNMAVQGRNYIPGPSYRQQRVSTTVTQNNNSEFAWPGASSWALNGRNSLMNPGPAMASHKEGEDRFFPLSGSLIFGKQGTGRDNVDADKVMITNEEEIKTTNPVATESYGQVATNHQSAQAQAQTGWVQNQGILPGMVWQDRDVYLQGPIWAKIPHTDGNFHPSPLMGGFGVKHPPPQILIKNTPVPADPPTAFNKDRLNSFITQYSTGQVSVEIEWELQKENSKRWNPEIQYTSNYYKSNNVEFAVNTEGVYSEPRPIGTRYLTRNL

SEQ ID NO: 370 - protein, 736 aa, Artificial Sequence
  Description of Artificial Sequence: Synthetic polypeptide
MAADGYLPDWLEDNLSEGIREWWALKPGAPQPKANQQHQDNARGLVLPGYKYLGPGNGLDKGEPVNAADAAALEHDKAYDQQLKAGDNPYLKYNHADAEFQERLKEDTSFGGNLGRAVFQAKKRLLEPLGLVEEAAKTAPGKKRPVEQSPQEPDSSAGIGKSGAQPAKKRLNFGQTGDTESVPDPQPIGEPPAAPSGVGSLTMASGGGAPVADNNEGADGVGSSSGNWHCDSQWLGDRVITTSTRTWALPTYNNHLYKQISNSTSGGSSNDNAYFGYSTPWGYFDFNRFHCHFSPRDWQRLINNNWGFRPKRLNFKLFNIQVKEVTDNNGVKTIANNLTSTVQVFTDSDYQLPYVLGSAHEGCLPPFPADVFMIPQYGYLTLNDGSQAVGRSSFYCLEYFPSQMLRTGNNFQFSYEFENVPFHSSYAHSQSLDRLMNPLIDQYLYYLSKTINGSGQNQQTLKFSVAGPSNMAVQGRNYIPGPSYRQQRVSTTVTQNNNSEFAWPGASSWALNGRNSLMNPGPAMASHKEGEDRFFPLSGSLIFGKQGTGRDNVDADKVMITNEEEIKTTNPVATESYGQVATNHQSAQAQAQTGWVQNQGILPGMVWQDRDVYLQGPIWAKIPHTDGNFHPSPLMGGFGVKHPPPQILIKNTPVPADPPTAFNKDKLNSFITQYSTGQVSVEIEWELQKENSKRWNPEIQYTSNYYKSNNVEFAVNTEGVYSEPRPIGTRYLTRNL

SEQ ID NO: 371 - protein, 736 aa, Artificial Sequence
  Description of Artificial Sequence: Synthetic polypeptide
MAADGYLPDWLEDNLSEGIREWWALKPGAPQPKANQQHQDNARGLVLPGYKYLGPGNGLDKGEPVNAADAAALEHDKAYDQQLKAGDNPYLKYNHADAEFQERLKEDTSFGGNLGRAVFQAKKRLLEPLGLVEEAAKTAPGKKRPVEQSPQEPDSSAGIGKSGAQPAKKRLNFGQTGDTESVPDPQPIGEPPAAPSGVGSLTMASGGGAPVADNNEGADGVGSSSGNWHCDSQWLGDRVITTSTRTWALPTYNNHLYKQISNSTSGGSSNDNAYFGYSTPWGYFDFNRFHCHFSPRDWQRLTNNNWGFRPKRLNFKLFNIQVKEVTDNNGVKTIANNLTSTVQVFTDSDYQLPYVLGSAHEGCLPPFPADVFMIPQYGYLTLNDGSQAVGRSSFYCLEYIPSQMLRTGNNFQFSYEFENVPFHSSYAHSQSLDRLMNPLIDQYLYYLSKTINGSGQNQQTLKFSVAGPSNMAVQGRNYIPGPSYRQQRVSTTVTQNNNSEFAWPGASSWALNGRNSLMNPGPAMASHKEGEDRFFPLSGSLIFGKQGTGRDNVDADKVMITNEEEIKTTNPVATESYGQVATNHQSAQAQAQTGWVQNQGILPGMVWQDRDVYLQGPIWAKIPHTDGNFHPSPLMGGFGVKHPPPQILIKNTPVPADPPTAFNKDKLNSFITQYSTGQVSVEIEWELQKENSKRWNPEIQYTSNYYKSNNVEFAVNTEGVYSEPRPIGTRYLTRNL

SEQ ID NO: 372 - protein, 736 aa, Artificial Sequence
  Description of Artificial Sequence: Synthetic polypeptide
MAADGYLPDWLEDNLSEGIREWWALKPGAPQPKANQQHQDNARGLVLPGYKYLGPGNGLDKGEPVNAADAAALEHDKAYDQQLKAGDNPYLKYNHADAEFQERLKEDTSFGGNLGRAVFQAKKRLLEPLGLVEEAAKTAPGKKRPVEQSPQEPDSSAGIGKSGAQPAKKRLNFGQTGDTESVPDPQPIGEPPAAPSGVGSLTMASGGGAPVADNNEGADGVGSSSGNWHCDSQWLGDRVITTSTRTWALPTYNNHLYKQISNSTSGGSSNDNAYFGYSTPWGYFDFNRFHCHFSPRDWQRLINNNWGFRPKRLNFKLFNIQVKEVTDNNGVKTIANNLTSTVQVFTDSDYQLPYVLGSAHEGCLPPFPADVFMIPQYGYLTLNDGSQAVGRSSFYCLEYFPSQMLRTGNNFQFSYEFENVPFHSSYAHSQSLDRLMNPLIDQYLYYLSKTINGSGQNQQTLKFSVAGPSNMAVQGRNYIPGPSYRQQRVSTTVTQNNNSEFAWPGASSWALNGRNSLMNPGPAMASHKEGEDRFFPLSGSLISGKQGTGRDNVDANKVMITNEEEIKTTNPVATESYGQVATNHQSAQAQAQTGWVQNQGILPGMVWQDRDVYLQGPIWAKIPHTDGNFHPSPLMGGFEMKHPPPQILIKNTPVPADPPTAFNKDKLNSFITQYSTGQVSVEIEWELQKENSKRWNPEIQYTSNYYKSNNVEFAVNTEGVYSEPRPIGTRYLTRNL

SEQ ID NO: 373 - protein, 736 aa, Artificial Sequence
  Description of Artificial Sequence: Synthetic polypeptide
MAADGYLPDWLEDNLSEGIREWWALKPGAPQPKANQQHQDNARGLVLPGYKYLGPGNGLDKGEPVNAADAAALEHDKAYDQQLKAGDNPYLKYNHADAEFQERLKEDTSFGGNLGRAVFQAKKRLLEPLGLVEEAAKTAPGKKRPVEQSPQEPDSSAGIGKSGAQPAKKRLNFGQTGDTEPVPDPQPIGEPPAAPSGVGSLTMASGGGAPVADNNEGADGVGSSSGNWHCDSQWLGDRVITTSTRTWALPTYNNHLYKQISNSTSGGSSNDNAYFGYSTPWGYFDFNRFHCHFSPRDWQRLINNNWGFRPKRLNFKLFNIQVKEVTDNNGVKTIANNLTSTVQVFTDSDYQLPYVLGSAHEGCLPPFPAGVFMIPQYGYLTLNDGSQAVGRSSFYCLEYFPSQMLRTGNNFQFSYEFENVPFHSSYAHSQSLDRLMNPLIDQYLYYLSKTINGSGQNQQTLKFSVAGPSNMAVQGRNYIPGPSYRQQRVSTTATQNNNSEFAWPGASSWALNGRNSLMNPGPAMASHKEGEDRFFPLSGSLIFGKQGTGRDNVDADKVMITNEEEIKTTNPVATESYGQVATNHQSAQAQAQTGWVQNQGILPGMVWQDRDVYLQGPIWAKIPHTDGNFHPSPLMGGFGMKHPPPQILIKNTPVPADPPTAFNKDKLNSFITQYSTGQVSVEIEWELQKENSKRWNPEIQYTSNYYKSNNVEFAVNTEGVYSEPRPIGTRYLTRNL

SEQ ID NO: 374 - protein, 736 aa, Artificial Sequence
  Description of Artificial Sequence: Synthetic polypeptide
MAADGYLPDWLEDNLSEGIREWWALKPGAPQPKANQQHQDNARGLVLPGYKYLGPGNGLDKGEPVNAADAAALEHDKAYDQQLKAGDNPYLKYNHADAGFQERLKEDTSFGGNLGRAVFQAKKRLLEPLGLVEEAAKTAPGKKRPVEQSPQEPDSSAGIGKSGAQPAKKRLNFGQTGDTESVPVPQPIGEPPAAPSGVGSLTMASGGGAPVADNNEGADGVGSSSGNWHCDSQWLGDRVITTSTRTWALPTYNNHLYKQISNSTSGGSSNDNAYFGYSTPWGYFDFNRFHCHFSPRDWQRLINNNWGFRPKRLNFKLFNIQVKEVTDNNGVKTIANNLTSTVQVFTDSDYQLPYVLGSAHEGCLPPFPADVFMIPQYGYLTLNDGSQAVGRSSFYCLEYFPSQMLRTGNNFQFSYEFENVPFHSSYAHSQSLDRLMNPLIDQYLYYLSKTINGSGQNQQTLKFSVAGPSNMAVQGRNYIPGPSYRQQRVSTTVTQNNNSEFAWPGASSWALNGRNSLMNPGPAMASHKEGEDRFFPLSGSLIFGKQGAGRDNVDADKVMITNEEEIKTTNPVATESYGQVATNHQSAQAQAQTGWVQNQGILPGMVWQDRDVYLQGPIWAKIPHTDGNFHPSPLMGGFGMKHPPPQILIKNTPVPADPPTAFNKDKLNSFITQYSTGQVSVEIEWELQKENSKRWNPEIQYTSNYYKSNNVEFAVNTEGVYSEPRPIGTRYLTRNL

SEQ ID NO: 375 - protein, 736 aa, Artificial Sequence
  Description of Artificial Sequence: Synthetic polypeptide
  MOD_RES (126)..(126): Any amino acid
MAADGYLPDWLEDNLSEGIRERWALKPGAPQPKANQQHQDNARGLVLPGYKYLGPGNGLDKGEPVNAADAAALEHDKAYDQQLKAGDNPYLKYNHADAEFQERLKEDTSFGGNLGRAVFQAKKRLXEPLGLVEEAAKTAPGKKRPVEQSPQEPDSSAGIGKSGAQPAKKRLNFGQTGDTESVPDPQPIGEPPAAPSGVGSLTMASGGGAPVADNNEGADGVGSSSGNWHCDSQWLGDRVITTSTRTWALPTYNNHLYKQISNSTSGGSSNDNAYFGYSTPWGYFDFNRFHCHFSPRDWQRLINNNWGFRPKRLNFKLFNIQVKEVTDNNGVKTIANNLTSTVQVFTDSDYQLPYVLGSAHEGCLPPFPADVFMIPQYGYLTLNDGSQAVGRSSFYCLEYFPSQMLRTGNNFQFSYEFENVPFHSSYAHSQSPDRLMNPLIDQYLYYLSKTINGSGQNQQTLKFSVAGPSNMAVQGRNYIPGPSYRQQRVSTTVTQNNNSEFAWPGASSWALNGRNSLMNPGPAMASHKEGEDRFFPLSGSLIFGKQGTGRDNVDADKVMITNEEEIKTTNPVATESYGQVATNHQSAQAQAQTGWVQNQGILPGMVWQDRDVYLQGPIWAKIPHTDGNFHPSPLMGGFGVKHPPPQILIKNTPVPADPPTAFNKDKLNSFITQYSTGQVSVEIEWELQKENSKRWNPEIQYTSNYYKSNNVEFAVNTEGVYSEPRPIGTRYLTRNL

SEQ ID NO: 376 - protein, 736 aa, Artificial Sequence
  Description of Artificial Sequence: Synthetic polypeptide
MAADGYLPDWLEDNLSEGIREWWALKPGAPQPKANQQHQDNARGLVLPGYKYLGPGNGLDKGEPVNAADAAALEHDKAYDQQLKAGDNPYLKYNHADAEFQERLKEDTSFGGNLGRAVFQAKKRLLEPLGLVEEAAKTAPGKKRPVEQSPQEPDSSAGIGKSGAQPAKKRLNFGQTGDTESVPDPQPIGEPPAAPSGVGSLTMASGGGAPVADNNEGADGVGSSSGNWHCDSQWLGDRVITTSTRTWALPTYNNHLYKQISNSTSGGSSNDNAYFGYSTPWGYFDFNRFHCHFSPRDWQRLINNNWGFRPKRLNFKLFNIQVKEVTDNNGVKTIANNLTSTVQVFTDSDYQLPYVLGSAHEGCLPPFPADVFMIPQYGYLTLNDGSQAVGRSSFYCLEYFPSQMLRTGNNFQFSYEFENVPFHSSYAHSQSLDRLMNPLIDQYLYYLSKTINGSGQNQQTLKFSVAGPSNMAVQGRNYIPGPSYRQQRVSTTVTQNNNSEFAWPGASSWALNGRNSLMNPGPAMASHKEGEDRFFPLSGSLIFGKQGTGRDNVDADKVMITNEEEIKTTNPVATESYGQVATNHQSAQAQAQTGWVQNQGILPGMVWQDRDVYLQGPIWAKIPHTDGNFHPSPLMGGFGMKHPPPQILIKNTPVPADPPTAFNKDKLDSFITQYSTGQVSVEIEWELQKENSKRWNPVIQYTSNYYKSNNVEFAVNTEGVYSEPRPIGTRYLTRNL

SEQ ID NO: 377 - protein, 736 aa, Artificial Sequence
  Description of Artificial Sequence: Synthetic polypeptide
MAADGYLPDWLEDNLSEGIREWWALKPGAPQPKANQQHQDNARGLVLPGYKYLGPGNGLDKGEPVNAADAAALEHDKAYDQQLKAGDNPYLKYNHADAEFQERLKEDTSFGGNLGRAVFQAKKRLLEPLGLVEEAAKTAPGKKRPVEQSPQEPDSSAGIGKSGAQPAKKRLNFGQTGDTESVPDPQPIGEPPAAPSGVGSLTMASGGGAPVADNNEGADGVGSSSGNWHCDSQWLGDRVITTSTRTWALPTYNNHLYKQISNSTSGGSSNDNAYLGYSTPWGYFDFNRFHCHFSPRDWQRLINNNWGFRPKRLNFKLFNIQVKEVTDNNGVKTIANNLTSTVQVFTDSDYQLPYVLGSAHEGCLPPFPADVFMIPQYGYLTLNDGSQAVGRSSFYCLEYFPSQMLRTGNNFQFSYEFENVPFHSSYAHSQSLDRLMNPLIDQYLYYLSKTINGSGQNQQTLKFSVAGPSNMAVQGRNYIPGPSYRQQRVSTTVTQNNNSEFAWPGASSWALNGRNSLMNPGPAMASHKEGEDRFFPLSGSLIFGKQGTGRDNVDADKVMITNEEEIKTTNPVATESYGQVATNHQSAQAQAQTGWVQNQGILPGMVWQDRDVYLQGPIWAKIPHTDGNFHPSPLMGGFGMKHPPPQILIKNTPVPADPPTAFNKDKLNSFITQYSTGQVSVEIEWELQKENSKRWNPEIQYTSNYYKSNNVEFAVNTEGVYSEPRPIGTRYLTRNL

SEQ ID NO: 378 - protein, 731 aa, Artificial Sequence
  Description of Artificial Sequence: Synthetic polypeptide
MAADGYLPDWLEDNLSEGIREWWALKPGAPQPKANQQHQDNARGLVLPGYKYLGPGNGLDKGEPVNAADAAALEHDKAYDQQLKAGDNPYLKYNHADAEFQERLKEDTSFGGNLGRAVFQAKKRLLEPLGLVEEAAKTAPGKKRPVEQSPQEPDSSAGIGKSGAQPAKKRLNFGQTGDTESVPDPQPIGEPPAAPSGVGSLTIASGGGAPVADNNEGADGVGSSSGNWHCDSQWLGDRVITTSTRTWALPTYNNHLYKRISNSTSGGSSNDNAYFGYSTPWGYFDFNRFHCHFSPRDWQRLINNNWGFRPKRLNFKLFNIRVKEVTDNNGVKTITNNLTSTVQVFTDSDYQLPYVLGSAHEGCLPPFPADVFMIPQYGYLTLNDGSQAVGRSSFYCLEYFPSQMLRTGNNFQFSYEFENVPFHSSYAHSQSLDRLMNPLIDQYLYYLSKTINGSGQNQQTLKFSVAGPSNMAVQGRNYIPGPSYRQQRVSTTVTRNNNSEFAWPGASSWALNGRNSLMNPGPAMASHKEGEDRFFPLSGSLIFGKQGTGRDNVDADKVMITNEEEIKTTNPVATESYGQVATNHQSAQAQAQTGWFKTKEYFRVWFGRTEMCTCKDPFGPKFLTRTATFTLLRWEGLESTRLLRSSSKTHLYLRILQRPSTRTSTLSSPSILLAKSAWRSSGSCRRKTASAGTRRSSTLPTITSLIMLNLLLILKVYIVNPAPLAPDTLVI

SEQ ID NO: 379 - protein, 735 aa, Artificial Sequence
  Description of Artificial Sequence: Synthetic polypeptide
MAADGYLPDWLEDTLSEGIRQWWKLKPGPPPPKPAERHKDDSRGLVLPGYKYLGPFNGLDKGEPVNEADAAALEHDKAYDRQLDSGDNPYLKYNHADAEFQERLKEDTSFGGNLGRAVFQAKKRVLEPLGLVEEPVKTAPGKKRPVEHSPVEPDSSSGTGKAGQQPARKRLNFGQTGDADSVPDPQPLGQPPAAPSGLGTNTMATGSGAPMADNNEGADGVGNSSGNWHCDSTWMGDRVITTSTRTWALPTYNNHLYKQISSQSGASNDNHYFGYSTPWGYFDFNRFHCHFSPRDWQRLINNNWGFRPKRLNFKLFNIQVKEVTQNDGTTTIANNLTSTVQVFTDSEYQLPYVLGSAHQGCLPPFPADVFMVPQYGYLTLNNGSQAVGRSSFYCLEYFPSQMLRTGNNFTFSYTFEDVPFHSSYAHSQSLDRLMNPLIDQYLYYLSRTNTPSGTTTQSRLQFSRAGASDIRDQSRNWLPGPCYRQQRVSKTSADNNNSEYSWTGATKYHLNGRDSLVNPGPAMASHKDDEEKFFPQSGVLIFGKQGSEKTNVDIEKVMITDEEEIRTTNPVATEQYGSVSTNLQRGNRQAATADVNTQGVLPGMVWQDRDVYLQGPIWAKIPHTDGHFHPSPLMGGFGLKHPPPQILIKNTPVPANPSTTFSAAKFASFITQYSTGQVSVEIEWELQKENSKRWNPEIQYTSNYNKSVNVDFTVDTNGVYSEPRPIGTRYLTRNL

SEQ ID NO: 380 - DNA, 2217 bp, Artificial Sequence
  Description of Artificial Sequence: Synthetic polynucleotide
atggctgccgatggttatcttccagattggctcgaggacactctctctgaaggaataagacagtggtggaagctcaaacctggcccaccaccaccaaagcccgcagagcggcataaggacgacagcaggggtcttgtgcttcctgggtacaagtacctcggacccttcaacggactcgacaagggagagccggtcaacgaggcagacgccgcggccctcgagcacgacaaagcctacgaccggcagctcgacagcggagacaacccgtacctcaagtacaaccacgccgacgcggagtttcaggagcgccttaaagaagatacgtcttttgggggcaacctcggacgagcagtcttccaggcgaaaaagagggttcttgaacctctgggcctggttgaggaacctgttaagacggctccgggaaaaaagaggccggtagagcactctcctgtggagccagactcctcctcgggaaccggaaaggcgggccagcagcctgcaagaaaaagattgaattttggtcagactggagacgcagactcagtacctgacccccagcctctcggacagccaccagcagccccctctggtctgggaactaatacgatggctacaggcagtggcgcaccaatggcagacaataacgagggcgccgacggagtgggtaattcctcgggaaattggcattgcgattccacatggatgggcgacagagtcatcaccaccagcacccgaacctgggccctgcccacctacaacaaccacctctacaaacaaatttcctccaacgggacatcgggaggagccaccaacgacaatcactactttggctacagcaccccttgggggtattttgacttcaacagattccactgccacttttcaccacgtgactggcaaagactcatcaacaacaactggggattccgacccaagagactcaacttcaagctctttaacattcaagtcaaagaggtcacgcagaatgacggtacgacgacgattgccaataaccttaccagcacggttcaggtgtttactgactcggagtaccagctcccgtacgtcctcggctcggcgcatcaaggatgcctcccgccgttcccagcagacgtcttcatggtgccacagtatggatacctcaccctgaacaacgggagtcaggcagtaggacgctcttcattttactgcctggagtactttccttctcagatgctgcgtaccggaaacaactttaccttcagctacacttttgaggacgttcctttccacagcagctacgctcacagccagagtctggaccgtctcatgaatcctctcatcgaccagtacctgtattacttgagcagaacaaacactccaagtggaaccaccacgcagtcaaggcttcagttttctcaggccggagcgagtgacattcgggaccagtctaggaactggcttcctggaccctgttaccgccagcagcgagtatcaaagacatctgcggataacaacaacagtgaatactcgtggactggagctaccaagtaccacctcaatggcagagactctctggtgaatccgggcccggccatggcaagccacaaggacgatgaagaaaagttttttcctcagagcggggttctcatctttgggaagcaaggctcagagaaaacaaatgtggacattgaaaaggtcatgattacagacgaagaggaaatcaggacaaccaatcccgtggctacggagcagtatggttctgtatctaccaacctccagagaggcaacagacaagcagctaccgcagatgtcaacacacaaggcgttcttccaggcatggtctggcaggacagagatgtgtaccttcaggggcccatctgggcaaagattccacacacggacggacattttcacccctctcccctcatgggtggattcggacttaaacaccctcctccacagattctcatcaagaacaccccggtacctgcgaatccttcgaccaccttcagtgcggcaaagtttgcttccttcatcacacagtactccacgggacaggtcagcgtggagatcgagtgggagctgcagaaggaaaacagcaaacgctggaatcccgaaattcagtacacttccaactacaacaagtctgttaatgtggactttactgtggacactaatggcgtgtattcagagcctcgccccattggcaccagatacctgactcgtaatctgtaa

SEQ ID NO: 381 - DNA, 2214 bp, Artificial Sequence
  Description of Artificial Sequence: Synthetic polynucleotide
atggctgccgatggttatcttccagattggctcgaggacactctctctgaaggaataagacagtggtggaagctcaaacctggcccaccaccaccaaagcccgcagagcggcataaggacgacagcaggggtcttgtgcttcctgggtacaagtacctcggacccttcaacggactcgacaagggagagccggtcaacgaggcagacgccgcggccctcgagcacgacaaagcctacgaccggcagctcgacagcggagacaacccgtacctcaagtacaaccacgccgacgcggagtttcaggagcgccttaaagaagatacgtcttttgggggcaacctcggacgagcagtcttccaggcgaaaaagagggttcttgaacctctgggcctggttgaggaacctgttaagacggctccgggaaaaaagaggccggtagagcactctcctgtggagccagactcctcctcgggaaccggaaaggcgggccagcagcctgcaagaaaaagattgaattttggtcagactggagacgcagactcagtacctgacccccagcctctcggacagccaccagcagccccctctggtctgggaactaatacgatggctacaggcagtggcgcaccaatggcagacaataacgagggcgccgacggagtgggtaattcctcgggaaattggcattgcgattccacatggatgggcgacagagtcatcaccaccagcacccgaacctgggccctgcccacctacaacaaccacctctacaaacaaatttccaacagcacatctggaggatcttcaaacgacaatcactactttggctacagcaccccttgggggtattttgacttcaacagattccactgccacttttcaccacgtgactggcaaagactcatcaacaacaactggggattccgacccaagagactcaacttcaagctctttaacattcaagtcaaagaggtcacgcagaatgacggtacgacgacgattgccaataaccttaccagcacggttcaggtgtttactgactcggagtaccagctcccgtacgtcctcggctcggcgcatcaaggatgcctcccgccgttcccagcagacgtcttcatggtgccacagtatggatacctcaccctgaacaacgggagtcaggcagtaggacgctcttcattttactgcctggagtactttccttctcagatgctgcgtaccggaaacaactttaccttcagctacacttttgaggacgttcctttccacagcagctacgctcacagccagagtctggaccgtctcatgaatcctctcatcgaccagtacctgtattacttgagcagaacaaacactccaagtggaaccaccacgcagtcaaggcttcagttttctcaggccggagcgagtgacattcgggaccagtctaggaactggcttcctggaccctgttaccgccagcagcgagtatcaaagacatctgcggataacaacaacagtgaatactcgtggactggagctaccaagtaccacctcaatggcagagactctctggtgaatccgggcccggccatggcaagccacaaggacgatgaagaaaagttttttcctcagagcggggttctcatctttgggaagcaaggctcagagaaaacaaatgtggacattgaaaaggtcatgattacagacgaagaggaaatcaggacaaccaatcccgtggctacggagcagtatggttctgtatctaccaacctccagagaggcaacagacaagcagctaccgcagatgtcaacacacaaggcgttcttccaggcatggtctggcaggacagagatgtgtaccttcaggggcccatctgggcaaagattccacacacggacggacattttcacccctctcccctcatgggtggattcggacttaaacaccctcctccacagattctcatcaagaacaccccggtacctgcgaatccttcgaccaccttcagtgcggcaaagtttgcttccttcatcacacagtactccacgggacaggtcagcgtggagatcgagtgggagctgcagaaggaaaacagcaaacgctggaatcccgaaattcagtacacttccaactacaacaagtctgttaatgtggactttactgtggacactaatggcgtgtattcagagcctcgccccattggcaccagatacctgactcgtaatctgtaa

SEQ ID NO: 382 - DNA, 2214 bp, Artificial Sequence
  Description of Artificial Sequence: Synthetic polynucleotide
atggctgccgatggttatcttccagattggctcgaggacactctctctgaaggaataagacagtggtggaagctcaaacctggcccaccaccaccaaagcccgcagagcggcataaggacgacagcaggggtcttgtgcttcctgggtacaagtacctcggacccttcaacggactcgacaagggagagccggtcaacgaggcagacgccgcggccctcgagcacgacaaagcctacgaccggcagctcgacagcggagacaacccgtacctcaagtacaaccacgccgacgcggagtttcaggagcgccttaaagaagatacgtcttttgggggcaacctcggacgagcagtcttccaggcgaaaaagagggttcttgaacctctgggcctggttgaggaacctgttaagacggctccgggaaaaaagaggccggtagagcactctcctgtggagccagactcctcctcgggaaccggaaaggcgggccagcagcctgcaagaaaaagattgaattttggtcagactggagacgcagactcagtacctgacccccagcctctcggacagccaccagcagccccctctggtctgggaactaatacgatggctacaggcagtggcgcaccaatggcagacaataacgagggcgccgacggagtgggtaattcctcgggaaattggcattgcgattccacatggatgggcgacagagtcatcaccaccagcacccgaacctgggccctgcccacctacaacaaccacctctacaaacaaatttccaacggcacctcgggaggaagcaccaacgacaatcactactttggctacagcaccccttgggggtattttgacttcaacagattccactgccacttttcaccacgtgactggcaaagactcatcaacaacaactggggattccgacccaagagactcaacttcaagctctttaacattcaagtcaaagaggtcacgcagaatgacggtacgacgacgattgccaataaccttaccagcacggttcaggtgtttactgactcggagtaccagctcccgtacgtcctcggctcggcgcatcaaggatgcctcccgccgttcccagcagacgtcttcatggtgccacagtatggatacctcaccctgaacaacgggagtcaggcagtaggacgctcttcattttactgcctggagtactttccttctcagatgctgcgtaccggaaacaactttaccttcagctacacttttgaggacgttcctttccacagcagctacgctcacagccagagtctggaccgtctcatgaatcctctcatcgaccagtacctgtattacttgagcagaacaaacactccaagtggaaccaccacgcagtcaaggcttcagttttctcaggccggagcgagtgacattcgggaccagtctaggaactggcttcctggaccctgttaccgccagcagcgagtatcaaagacatctgcggataacaacaacagtgaatactcgtggactggagctaccaagtaccacctcaatggcagagactctctggtgaatccgggcccggccatggcaagccacaaggacgatgaagaaaagttttttcctcagagcggggttctcatctttgggaagcaaggctcagagaaaacaaatgtggacattgaaaaggtcatgattacagacgaagaggaaatcaggacaaccaatcccgtggctacggagcagtatggttctgtatctaccaacctccagagaggcaacagacaagcagctaccgcagatgtcaacacacaaggcgttcttccaggcatggtctggcaggacagagatgtgtaccttcaggggcccatctgggcaaagattccacacacggacggacattttcacccctctcccctcatgggtggattcggacttaaacaccctcctccacagattctcatcaagaacaccccggtacctgcgaatccttcgaccaccttcagtgcggcaaagtttgcttccttcatcacacagtactccacgggacaggtcagcgtggagatcgagtgggagctgcagaaggaaaacagcaaacgctggaatcccgaaattcagtacacttccaactacaacaagtctgttaatgtggactttactgtggacactaatggcgtgtattcagagcctcgccccattggcaccagatacctgactcgtaatctgtaa

SEQ ID NO: 383 - DNA, 2214 bp, Artificial Sequence
  Description of Artificial Sequence: Synthetic polynucleotide
atggctgccgatggttatcttccagattggctcgaggacactctctctgaaggaataagacagtggtggaagctcaaacctggcccaccaccaccaaagcccgcagagcggcataaggacgacagcaggggtcttgtgcttcctgggtacaagtacctcggacccttcaacggactcgacaagggagagccggtcaacgaggcagacgccgcggccctcgagcacgacaaagcctacgaccggcagctcgacagcggagacaacccgtacctcaagtacaaccacgccgacgcggagtttcaggagcgccttaaagaagatacgtcttttgggggcaacctcggacgagcagtcttccaggcgaaaaagagggttcttgaacctctgggcctggttgaggaacctgttaagacggctccgggaaaaaagaggccggtagagcactctcctgtggagccagactcctcctcgggaaccggaaaggcgggccagcagcctgcaagaaaaagattgaattttggtcagactggagacgcagactcagtacctgacccccagcctctcggacagccaccagcagccccctctggtctgggaactaatacgatggctacaggcagtggcgcaccaatggcagacaataacgagggcgccgacggagtgggtaattcctcgggaaattggcattgcgattccacatggatgggcgacagagtcatcaccaccagcacccgaacctgggccctgcccacctacaacaaccacctctacaaacaaatttccaacgggagccaatcaggagcctcgaacgacaatcactactttggctacagcaccccttgggggtattttgacttcaacagattccactgccacttttcaccacgtgactggcaaagactcatcaacaacaactggggattccgacccaagagactcaacttcaagctctttaacattcaagtcaaagaggtcacgcagaatgacggtacgacgacgattgccaataaccttaccagcacggttcaggtgtttactgactcggagtaccagctcccgtacgtcctcggctcggcgcatcaaggatgcctcccgccgttcccagcagacgtcttcatggtgccacagtatggatacctcaccctgaacaacgggagtcaggcagtaggacgctcttcattttactgcctggagtactttccttctcagatgctgcgtaccggaaacaactttaccttcagctacacttttgaggacgttcctttccacagcagctacgctcacagccagagtctggaccgtctcatgaatcctctcatcgaccagtacctgtattacttgagcagaacaaacactccaagtggaaccaccacgcagtcaaggcttcagttttctcaggccggagcgagtgacattcgggaccagtctaggaactggcttcctggaccctgttaccgccagcagcgagtatcaaagacatctgcggataacaacaacagtgaatactcgtggactggagctaccaagtaccacctcaatggcagagactctctggtgaatccgggcccggccatggcaagccacaaggacgatgaagaaaagttttttcctcagagcggggttctcatctttgggaagcaaggctcagagaaaacaaatgtggacattgaaaaggtcatgattacagacgaagaggaaatcaggacaaccaatcccgtggctacggagcagtatggttctgtatctaccaacctccagagaggcaacagacaagcagctaccgcagatgtcaacacacaaggcgttcttccaggcatggtctggcaggacagagatgtgtaccttcaggggcccatctgggcaaagattccacacacggacggacattttcacccctctcccctcatgggtggattcggacttaaacaccctcctccacagattctcatcaagaacaccccggtacctgcgaatccttcgaccaccttcagtgcggcaaagtttgcttccttcatcacacagtactccacgggacaggtcagcgtggagatcgagtgggagctgcagaaggaaaacagcaaacgctggaatcccgaaattcagtacacttccaactacaacaagtctgttaatgtggactttactgtggacactaatggcgtgtattcagagcctcgccccattggcaccagatacctgactcgtaatctgtaa

SEQ ID NO: 384 - DNA, 2214 bp, Artificial Sequence
  Description of Artificial Sequence: Synthetic polynucleotide
atggctgccgatggttatcttccagattggctcgaggacactctctctgaaggaataagacagtggtggaagctcaaacctggcccaccaccaccaaagcccgcagagcggcataaggacgacagcaggggtcttgtgcttcctgggtacaagtacctcggacccttcaacggactcgacaagggagagccggtcaacgaggcagacgccgcggccctcgagcacgacaaagcctacgaccggcagctcgacagcggagacaacccgtacctcaagtacaaccacgccgacgcggagtttcaggagcgccttaaagaagatacgtcttttgggggcaacctcggacgagcagtcttccaggcgaaaaagagggttcttgaacctctgggcctggttgaggaacctgttaagacggctccgggaaaaaagaggccggtagagcactctcctgtggagccagactcctcctcgggaaccggaaaggcgggccagcagcctgcaagaaaaagattgaattttggtcagactggagacgcagactcagtacctgacccccagcctctcggacagccaccagcagccccctctggtctgggaactaatacgatggctacaggcagtggcgcaccaatggcagacaataacgagggcgccgacggagtgggtaattcctcgggaaattggcattgcgattccacatggatgggcgacagagtcatcaccaccagcacccgaacctgggccctgcccacctacaacaaccacctctacaaacaaatttccagccaaggaacctcaggagcctcgaacgacaatcactactttggctacagcaccccttgggggtattttgacttcaacagattccactgccacttttcaccacgtgactggcaaagactcatcaacaacaactggggattccgacccaagagactcaacttcaagctctttaacattcaagtcaaagaggtcacgcagaatgacggtacgacgacgattgccaataaccttaccagcacggttcaggtgtttactgactcggagtaccagctcccgtacgtcctcggctcggcgcatcaaggatgcctcccgccgttcccagcagacgtcttcatggtgccacagtatggatacctcaccctgaacaacgggagtcaggcagtaggacgctcttcattttactgcctggagtactttccttctcagatgctgcgtaccggaaacaactttaccttcagctacacttttgaggacgttcctttccacagcagctacgctcacagccagagtctggaccgtctcatgaatcctctcatcgaccagtacctgtattacttgagcagaacaaacactccaagtggaaccaccacgcagtcaaggcttcagttttctcaggccggagcgagtgacattcgggaccagtctaggaactggcttcctggaccctgttaccgccagcagcgagtatcaaagacatctgcggataacaacaacagtgaatactcgtggactggagctaccaagtaccacctcaatggcagagactctctggtgaatccgggcccggccatggcaagccacaaggacgatgaagaaaagttttttcctcagagcggggttctcatctttgggaagcaaggctcagagaaaacaaatgtggacattgaaaaggtcatgattacagacgaagaggaaatcaggacaaccaatcccgtggctacggagcagtatggttctgtatctaccaacctccagagaggcaacagacaagcagctaccgcagatgtcaacacacaaggcgttcttccaggcatggtctggcaggacagagatgtgtaccttcaggggcccatctgggcaaagattccacacacggacggacattttcacccctctcccctcatgggtggattcggacttaaacaccctcctccacagattctcatcaagaacaccccggtacctgcgaatccttcgaccaccttcagtgcggcaaagtttgcttccttcatcacacagtactccacgggacaggtcagcgtggagatcgagtgggagctgcagaaggaaaacagcaaacgctggaatcccgaaattcagtacacttccaactacaacaagtctgttaatgtggactttactgtggacactaatggcgtgtattcagagcctcgccccattggcaccagatacctgactcgtaatctgtaa

SEQ ID NO: 385 - DNA, 2214 bp, Artificial Sequence
  Description of Artificial Sequence: Synthetic polynucleotide
atggctgccgatggttatcttccagattggctcgaggacactctctctgaaggaataagacagtggtggaagctcaaacctggcccaccaccaccaaagcccgcagagcggcataaggacgacagcaggggtcttgtgcttcctgggtacaagtacctcggacccttcaacggactcgacaagggagagccggtcaacgaggcagacgccgcggccctcgagcacgacaaagcctacgaccggcagctcgacagcggagacaacccgtacctcaagtacaaccacgccgacgcggagtttcaggagcgccttaaagaagatacgtcttttgggggcaacctcggacgagcagtcttccaggcgaaaaagagggttcttgaacctctgggcctggttgaggaacctgttaagacggctccgggaaaaaagaggccggtagagcactctcctgtggagccagactcctcctcgggaaccggaaaggcgggccagcagcctgcaagaaaaagattgaattttggtcagactggagacgcagactcagtacctgacccccagcctctcggacagccaccagcagccccctctggtctgggaactaatacgatggctacaggcagtggcgcaccaatggcagacaataacgagggcgccgacggagtgggtaattcctcgggaaattggcattgcgattccacatggatgggcgacagagtcatcaccaccagcacccgaacctgggccctgcccacctacaacaaccacctctacaaacaaatttccagccaatcatcgggaggagcctcgaacgacaatcactactttggctacagcaccccttgggggtattttgacttcaacagattccactgccacttttcaccacgtgactggcaaagactcatcaacaacaactggggattccgacccaagagactcaacttcaagctctttaacattcaagtcaaagaggtcacgcagaatgacggtacgacgacgattgccaataaccttaccagcacggttcaggtgtttactgactcggagtaccagctcccgtacgtcctcggctcggcgcatcaaggatgcctcccgccgttcccagcagacgtcttcatggtgccacagtatggatacctcaccctgaacaacgggagtcaggcagtaggacgctcttcattttactgcctggagtactttccttctcagatgctgcgtaccggaaacaactttaccttcagctacacttttgaggacgttcctttccacagcagctacgctcacagccagagtctggaccgtctcatgaatcctctcatcgaccagtacctgtattacttgagcagaacaaacactccaagtggaaccaccacgcagtcaaggcttcagttttctcaggccggagcgagtgacattcgggaccagtctaggaactggcttcctggaccctgttaccgccagcagcgagtatcaaagacatctgcggataacaacaacagtgaatactcgtggactggagctaccaagtaccacctcaatggcagagactctctggtgaatccgggcccggccatggcaagccacaaggacgatgaagaaaagttttttcctcagagcggggttctcatctttgggaagcaaggctcagagaaaacaaatgtggacattgaaaaggtcatgattacagacgaagaggaaatcaggacaaccaatcccgtggctacggagcagtatggttctgtatctaccaacctccagagaggcaacagacaagcagctaccgcagatgtcaacacacaaggcgttcttccaggcatggtctggcaggacagagatgtgtaccttcaggggcccatctgggcaaagattccacacacggacggacattttcacccctctcccctcatgggtggattcggacttaaacaccctcctccacagattctcatcaagaacaccccggtacctgcgaatccttcgaccaccttcagtgcggcaaagtttgcttccttcatcacacagtactccacgggacaggtcagcgtggagatcgagtgggagctgcagaaggaaaacagcaaacgctggaatcccgaaattcagtacacttccaactacaacaagtctgttaatgtggactttactgtggacactaatggcgtgtattcagagcctcgccccattggcaccagatacctgactcgtaatctgtaa

SEQ ID NO: 386 - protein, 738 aa, Artificial Sequence
  Description of Artificial Sequence: Synthetic polypeptide
MAADGYLPDWLEDTLSEGIRQWWKLKPGPPPPKPAERHKDDSRGLVLPGYKYLGPFNGLDKGEPVNEADAAALEHDKAYDRQLDSGDNPYLKYNHADAEFQERLKEDTSFGGNLGRAVFQAKKRVLEPLGLVEEPVKTAPGKKRPVEHSPVEPDSSSGTGKAGQQPARKRLNFGQTGDADSVPDPQPLGQPPAAPSGLGTNTMATGSGAPMADNNEGADGVGNSSGNWHCDSTWMGDRVITTSTRTWALPTYNNHLYKQISSNGTSGGATNDNHYFGYSTPWGYFDFNRFHCHFSPRDWQRLINNNWGFRPKRLNFKLFNIQVKEVTQNDGTTTIANNLTSTVQVFTDSEYQLPYVLGSAHQGCLPPFPADVFMVPQYGYLTLNNGSQAVGRSSFYCLEYFPSQMLRTGNNFTFSYTFEDVPFHSSYAHSQSLDRLMNPLIDQYLYYLSRTNTPSGTTTQSRLQFSQAGASDIRDQSRNWLPGPCYRQQRVSKTSADNNNSEYSWTGATKYHLNGRDSLVNPGPAMASHKDDEEKFFPQSGVLIFGKQGSEKTNVDIEKVMITDEEEIRTTNPVATEQYGSVSTNLQRGNRQAATADVNTQGVLPGMVWQDRDVYLQGPIWAKIPHTDGHFHPSPLMGGFGLKHPPPQILIKNTPVPANPSTTFSAAKFASFITQYSTGQVSVEIEWELQKENSKRWNPEIQYTSNYNKSVNVDFTVDTNGVYSEPRPIGTRYLTRNL

SEQ ID NO: 387 - protein, 737 aa, Artificial Sequence
  Description of Artificial Sequence: Synthetic polypeptide
MAADGYLPDWLEDTLSEGIRQWWKLKPGPPPPKPAERHKDDSRGLVLPGYKYLGPFNGLDKGEPVNEADAAALEHDKAYDRQLDSGDNPYLKYNHADAEFQERLKEDTSFGGNLGRAVFQAKKRVLEPLGLVEEPVKTAPGKKRPVEHSPVEPDSSSGTGKAGQQPARKRLNFGQTGDADSVPDPQPLGQPPAAPSGLGTNTMATGSGAPMADNNEGADGVGNSSGNWHCDSTWMGDRVITTSTRTWALPTYNNHLYKQISNSTSGGSSNDNHYFGYSTPWGYFDFNRFHCHFSPRDWQRLINNNWGFRPKRLNFKLFNIQVKEVTQNDGTTTIANNLTSTVQVFTDSEYQLPYVLGSAHQGCLPPFPADVFMVPQYGYLTLNNGSQAVGRSSFYCLEYFPSQMLRTGNNFTFSYTFEDVPFHSSYAHSQSLDRLMNPLIDQYLYYLSRTNTPSGTTTQSRLQFSQAGASDIRDQSRNWLPGPCYRQQRVSKTSADNNNSEYSWTGATKYHLNGRDSLVNPGPAMASHKDDEEKFFPQSGVLIFGKQGSEKTNVDIEKVMITDEEEIRTTNPVATEQYGSVSTNLQRGNRQAATADVNTQGVLPGMVWQDRDVYLQGPIWAKIPHTDGHFHPSPLMGGFGLKHPPPQILIKNTPVPANPSTTFSAAKFASFITQYSTGQVSVEIEWELQKENSKRWNPEIQYTSNYNKSVNVDFTVDTNGVYSEPRPIGTRYLTRNL

SEQ ID NO: 388 - protein, 737 aa, Artificial Sequence
  Description of Artificial Sequence: Synthetic polypeptide
MAADGYLPDWLEDTLSEGIRQWWKLKPGPPPPKPAERHKDDSRGLVLPGYKYLGPFNGLDKGEPVNEADAAALEHDKAYDRQLDSGDNPYLKYNHADAEFQERLKEDTSFGGNLGRAVFQAKKRVLEPLGLVEEPVKTAPGKKRPVEHSPVEPDSSSGTGKAGQQPARKRLNFGQTGDADSVPDPQPLGQPPAAPSGLGTNTMATGSGAPMADNNEGADGVGNSSGNWHCDSTWMGDRVITTSTRTWALPTYNNHLYKQISNGTSGGSTNDNHYFGYSTPWGYFDFNRFHCHFSPRDWQRLINNNWGFRPKRLNFKLFNIQVKEVTQNDGTTTIANNLTSTVQVFTDSEYQLPYVLGSAHQGCLPPFPADVFMVPQYGYLTLNNGSQAVGRSSFYCLEYFPSQMLRTGNNFTFSYTFEDVPFHSSYAHSQSLDRLMNPLIDQYLYYLSRTNTPSGTTTQSRLQFSQAGASDIRDQSRNWLPGPCYRQQRVSKTSADNNNSEYSWTGATKYHLNGRDSLVNPGPAMASHKDDEEKFFPQSGVLIFGKQGSEKTNVDIEKVMITDEEEIRTTNPVATEQYGSVSTNLQRGNRQAATADVNTQGVLPGMVWQDRDVYLQGPIWAKIPHTDGHFHPSPLMGGFGLKHPPPQILIKNTPVPANPSTTFSAAKFASFITQYSTGQVSVEIEWELQKENSKRWNPEIQYTSNYNKSVNVDFTVDTNGVYSEPRPIGTRYLTRNL

SEQ ID NO: 389 - protein, 737 aa, Artificial Sequence
  Description of Artificial Sequence: Synthetic polypeptide
MAADGYLPDWLEDTLSEGIRQWWKLKPGPPPPKPAERHKDDSRGLVLPGYKYLGPFNGLDKGEPVNEADAAALEHDKAYDRQLDSGDNPYLKYNHADAEFQERLKEDTSFGGNLGRAVFQAKKRVLEPLGLVEEPVKTAPGKKRPVEHSPVEPDSSSGTGKAGQQPARKRLNFGQTGDADSVPDPQPLGQPPAAPSGLGTNTMATGSGAPMADNNEGADGVGNSSGNWHCDSTWMGDRVITTSTRTWALPTYNNHLYKQISNGSQSGASNDNHYFGYSTPWGYFDFNRFHCHFSPRDWQRLINNNWGFRPKRLNFKLFNIQVKEVTQNDGTTTIANNLTSTVQVFTDSEYQLPYVLGSAHQGCLPPFPADVFMVPQYGYLTLNNGSQAVGRSSFYCLEYFPSQMLRTGNNFTFSYTFEDVPFHSSYAHSQSLDRLMNPLIDQYLYYLSRTNTPSGTTTQSRLQFSQAGASDIRDQSRNWLPGPCYRQQRVSKTSADNNNSEYSWTGATKYHLNGRDSLVNPGPAMASHKDDEEKFFPQSGVLIFGKQGSEKTNVDIEKVMITDEEEIRTTNPVATEQYGSVSTNLQRGNRQAATADVNTQGVLPGMVWQDRDVYLQGPIWAKIPHTDGHFHPSPLMGGFGLKHPPPQILIKNTPVPANPSTTFSAAKFASFITQYSTGQVSVEIEWELQKENSKRWNPEIQYTSNYNKSVNVDFTVDTNGVYSEPRPIGTRYLTRNL

SEQ ID NO: 390 - protein, 737 aa, Artificial Sequence
  Description of Artificial Sequence: Synthetic polypeptide
MAADGYLPDWLEDTLSEGIRQWWKLKPGPPPPKPAERHKDDSRGLVLPGYKYLGPFNGLDKGEPVNEADAAALEHDKAYDRQLDSGDNPYLKYNHADAEFQERLKEDTSFGGNLGRAVFQAKKRVLEPLGLVEEPVKTAPGKKRPVEHSPVEPDSSSGTGKAGQQPARKRLNFGQTGDADSVPDPQPLGQPPAAPSGLGTNTMATGSGAPMADNNEGADGVGNSSGNWHCDSTWMGDRVITTSTRTWALPTYNNHLYKQISSQGTSGASNDNHYFGYSTPWGYFDFNRFHCHFSPRDWQRLINNNWGFRPKRLNFKLFNIQVKEVTQNDGTTTIANNLTSTVQVFTDSEYQLPYVLGSAHQGCLPPFPADVFMVPQYGYLTLNNGSQAVGRSSFYCLEYFPSQMLRTGNNFTFSYTFEDVPFHSSYAHSQSLDRLMNPLIDQYLYYLSRTNTPSGTTTQSRLQFSQAGASDIRDQSRNWLPGPCYRQQRVSKTSADNNNSEYSWTGATKYHLNGRDSLVNPGPAMASHKDDEEKFFPQSGVLIFGKQGSEKTNVDIEKVMITDEEEIRTTNPVATEQYGSVSTNLQRGNRQAATADVNTQGVLPGMVWQDRDVYLQGPIWAKIPHTDGHFHPSPLMGGFGLKHPPPQILIKNTPVPANPSTTFSAAKFASFITQYSTGQVSVEIEWELQKENSKRWNPEIQYTSNYNKSVNVDFTVDTNGVYSEPRPIGTRYLTRNL

SEQ ID NO: 391 - protein, 737 aa, Artificial Sequence
  Description of Artificial Sequence: Synthetic polypeptide
MAADGYLPDWLEDTLSEGIRQWWKLKPGPPPPKPAERHKDDSRGLVLPGYKYLGPFNGLDKGEPVNEADAAALEHDKAYDRQLDSGDNPYLKYNHADAEFQERLKEDTSFGGNLGRAVFQAKKRVLEPLGLVEEPVKTAPGKKRPVEHSPVEPDSSSGTGKAGQQPARKRLNFGQTGDADSVPDPQPLGQPPAAPSGLGTNTMATGSGAPMADNNEGADGVGNSSGNWHCDSTWMGDRVITTSTRTWALPTYNNHLYKQISSQSSGGASNDNHYFGYSTPWGYFDFNRFHCHFSPRDWQRLINNNWGFRPKRLNFKLFNIQVKEVTQNDGTTTIANNLTSTVQVFTDSEYQLPYVLGSAHQGCLPPFPADVFMVPQYGYLTLNNGSQAVGRSSFYCLEYFPSQMLRTGNNFTFSYTFEDVPFHSSYAHSQSLDRLMNPLIDQYLYYLSRTNTPSGTTTQSRLQFSQAGASDIRDQSRNWLPGPCYRQQRVSKTSADNNNSEYSWTGATKYHLNGRDSLVNPGPAMASHKDDEEKFFPQSGVLIFGKQGSEKTNVDIEKVMITDEEEIRTTNPVATEQYGSVSTNLQRGNRQAATADVNTQGVLPGMVWQDRDVYLQGPIWAKIPHTDGHFHPSPLMGGFGLKHPPPQILIKNTPVPANPSTTFSAAKFASFITQYSTGQVSVEIEWELQKENSKRWNPEIQYTSNYNKSVNVDFTVDTNGVYSEPRPIGTRYLTRNL

SEQ ID NO: 392 - DNA, 2208 bp, Artificial Sequence
  Description of Artificial Sequence: Synthetic polynucleotide
atggctgccgatggttatcttccagattggctcgaggacactctctctgaaggaataagacagtggtggaagctcaaacctggcccaccaccaccaaagcccgcagagcggcataaggacgacagcaggggtcttgtgcttcctgggtacaagtacctcggacccttcaacggactcgacaagggagagccggtcaacgaggcagacgccgcggccctcgagcacgacaaagcctacgaccggcagctcgacagcggagacaacccgtacctcaagtacaaccacgccgacgcggagtttcaggagcgccttaaagaagatacgtcttttgggggcaacctcggacgagcagtcttccaggcgaaaaagagggttcttgaacctctgggcctggttgaggaacctgttaagacggctccgggaaaaaagaggccggtagagcactctcctgtggagccagactcctcctcgggaaccggaaaggcgggccagcagcctgcaagaaaaagattgaattttggtcagactggagacgcagactcagtacctgacccccagcctctcggacagccaccagcagccccctctggtctgggaactaatacgatggctacaggcagtggcgcaccaatggcagacaataacgagggcgccgacggagtgggtaattcctcgggaaattggcattgcgattccacatggatgggcgacagagtcatcaccaccagcacccgaacctgggccctgcccacctacaacaaccacctctacaaacaaatttccagccaatcaggagcctcgaacgacaatcactactttggctacagcaccccttgggggtattttgacttcaacagattccactgccacttttcaccacgtgactggcaaagactcatcaacaacaactggggattccgacccaagagactcaacttcaagctctttaacattcaagtcaaagaggtcacgcagaatgacggtacgacgacgattgccaataaccttaccagcacggttcaggtgtttactgactcggagtaccagctcccgtacgtcctcggctcggcgcatcaaggatgcctcccgccgttcccagcagacgtcttcatggtgccacagtatggatacctcaccctgaacaacgggagtcaggcagtaggacgctcttcattttactgcctggagtactttccttctcagatgctgcgtaccggaaacaactttaccttcagctacacttttgaggacgttcctttccacagcagctacgctcacagccagagtctggaccgtctcatgaatcctctcatcgaccagtacctgtattacttgagcagaacacaaacaacaggaggcacggcaaatacgcagactcttcagttttctcaggccggagcgagtgacattcgggaccagtctaggaactggcttcctggaccctgttaccgccagcagcgagtatcaaagacatctgcggataacaacaacagtgaatactcgtggactggagctaccaagtaccacctcaatggcagagactctctggtgaatccgggcccggccatggcaagccacaaggacgatgaagaaaagttttttcctcagagcggggttctcatctttgggaagcaaggctcagagaaaacaaatgtggacattgaaaaggtcatgattacagacgaagaggaaatcaggacaaccaatcccgtggctacggagcagtatggttctgtatctaccaacctccagagaggcaacagacaagcagctaccgcagatgtcaacacacaaggcgttcttccaggcatggtctggcaggacagagatgtgtaccttcaggggcccatctgggcaaagattccacacacggacggacattttcacccctctcccctcatgggtggattcggacttaaacaccctcctccacagattctcatcaagaacaccccggtacctgcgaatccttcgaccaccttcagtgcggcaaagtttgcttccttcatcacacagtactccacgggacaggtcagcgtggagatcgagtgggagctgcagaaggaaaacagcaaacgctggaatcccgaaattcagtacacttccaactacaacaagtctgttaatgtggactttactgtggacactaatggcgtgtattcagagcctcgccccattggcaccagatacctgactcgtaatctgtaa

SEQ ID NO: 393 - DNA, 2208 bp, Artificial Sequence
  Description of Artificial Sequence: Synthetic polynucleotide
atggctgccgatggttatcttccagattggctcgaggacactctctctgaaggaataagacagtggtggaagctcaaacctggcccaccaccaccaaagcccgcagagcggcataaggacgacagcaggggtcttgtgcttcctgggtacaagtacctcggacccttcaacggactcgacaagggagagccggtcaacgaggcagacgccgcggccctcgagcacgacaaagcctacgaccggcagctcgacagcggagacaacccgtacctcaagtacaaccacgccgacgcggagtttcaggagcgccttaaagaagatacgtcttttgggggcaacctcggacgagcagtcttccaggcgaaaaagagggttcttgaacctctgggcctggttgaggaacctgttaagacggctccgggaaaaaagaggccggtagagcactctcctgtggagccagactcctcctcgggaaccggaaaggcgggccagcagcctgcaagaaaaagattgaattttggtcagactggagacgcagactcagtacctgacccccagcctctcggacagccaccagcagccccctctggtctgggaactaatacgatggctacaggcagtggcgcaccaatggcagacaataacgagggcgccgacggagtgggtaattcctcgggaaattggcattgcgattccacatggatgggcgacagagtcatcaccaccagcacccgaacctgggccctgcccacctacaacaaccacctctacaaacaaatttccagccaatcaggagcctcgaacgacaatcactactttggctacagcaccccttgggggtattttgacttcaacagattccactgccacttttcaccacgtgactggcaaagactcatcaacaacaactggggattccgacccaagagactcaacttcaagctctttaacattcaagtcaaagaggtcacgcagaatgacggtacgacgacgattgccaataaccttaccagcacggttcaggtgtttactgactcggagtaccagctcccgtacgtcctcggctcggcgcatcaaggatgcctcccgccgttcccagcagacgtcttcatggtgccacagtatggatacctcaccctgaacaacgggagtcaggcagtaggacgctcttcattttactgcctggagtactttccttctcagatgctgcgtaccggaaacaactttaccttcagctacacttttgaggacgttcctttccacagcagctacgctcacagccagagtctggaccgtctcatgaatcctctcatcgaccagtacctgtattacttgagcagaacacaaacaacaggaggcacgacaaatacgcagactcttcagttttctcaggccggagcgagtgacattcgggaccagtctaggaactggcttcctggaccctgttaccgccagcagcgagtatcaaagacatctgcggataacaacaacagtgaatactcgtggactggagctaccaagtaccacctcaatggcagagactctctggtgaatccgggcccggccatggcaagccacaaggacgatgaagaaaagttttttcctcagagcggggttctcatctttgggaagcaaggctcagagaaaacaaatgtggacattgaaaaggtcatgattacagacgaagaggaaatcaggacaaccaatcccgtggctacggagcagtatggttctgtatctaccaacctccagagaggcaacagacaagcagctaccgcagatgtcaacacacaaggcgttcttccaggcatggtctggcaggacagagatgtgtaccttcaggggcccatctgggcaaagattccacacacggacggacattttcacccctctcccctcatgggtggattcggacttaaacaccctcctccacagattctcatcaagaacaccccggtacctgcgaatccttcgaccaccttcagtgcggcaaagtttgcttccttcatcacacagtactccacgggacaggtcagcgtggagatcgagtgggagctgcagaaggaaaacagcaaacgctggaatcccgaaattcagtacacttccaactacaacaagtctgttaatgtggactttactgtggacactaatggcgtgtattcagagcctcgccccattggcaccagatacctgactcgtaatctgtaa

SEQ ID NO: 394 - DNA, 2205 bp, Artificial Sequence
  Description of Artificial Sequence: Synthetic polynucleotide
atggctgccgatggttatcttccagattggctcgaggacactctctctgaaggaataagacagtggtggaagctcaaacctggcccaccaccaccaaagcccgcagagcggcataaggacgacagcaggggtcttgtgcttcctgggtacaagtacctcggacccttcaacggactcgacaagggagagccggtcaacgaggcagacgccgcggccctcgagcacgacaaagcctacgaccggcagctcgacagcggagacaacccgtacctcaagtacaaccacgccgacgcggagtttcaggagcgccttaaagaagatacgtcttttgggggcaacctcggacgagcagtcttccaggcgaaaaagagggttcttgaacctctgggcctggttgaggaacctgttaagacggctccgggaaaaaagaggccggtagagcactctcctgtggagccagactcctcctcgggaaccggaaaggcgggccagcagcctgcaagaaaaagattgaattttggtcagactggagacgcagactcagtacctgacccccagcctctcggacagccaccagcagccccctctggtctgggaactaatacgatggctacaggcagtggcgcaccaatggcagacaataacgagggcgccgacggagtgggtaattcctcgggaaattggcattgcgattccacatggatgggcgacagagtcatcaccaccagcacccgaacctgggccctgcccacctacaacaaccacctctacaaacaaatttccagccaatcaggagcctcgaacgacaatcactactttggctacagcaccccttgggggtattttgacttcaacagattccactgccacttttcaccacgtgactggcaaagactcatcaacaacaactggggattccgacccaagagactcaacttcaagctctttaacattcaagtcaaagaggtcacgcagaatgacggtacgacgacgattgccaataaccttaccagcacggttcaggtgtttactgactcggagtaccagctcccgtacgtcctcggctcggcgcatcaaggatgcctcccgccgttcccagcagacgtcttcatggtgccacagtatggatacctcaccctgaacaacgggagtcaggcagtaggacgctcttcattttactgcctggagtactttccttctcagatgctgcgtaccggaaacaactttaccttcagctacacttttgaggacgttcctttccacagcagctacgctcacagccagagtctggaccgtctcatgaatcctctcatcgaccagtacctgtattacttgagcagaacacaaacgactggaactggagggacgcagactcttcagttttctcaggccggagcgagtgacattcgggaccagtctaggaactggcttcctggaccctgttaccgccagcagcgagtatcaaagacatctgcggataacaacaacagtgaatactcgtggactggagctaccaagtaccacctcaatggcagagactctctggtgaatccgggcccggccatggcaagccacaaggacgatgaagaaaagttttttcctcagagcggggttctcatctttgggaagcaaggctcagagaaaacaaatgtggacattgaaaaggtcatgattacagacgaagaggaaatcaggacaaccaatcccgtggctacggagcagtatggttctgtatctaccaacctccagagaggcaacagacaagcagctaccgcagatgtcaacacacaaggcgttcttccaggcatggtctggcaggacagagatgtgtaccttcaggggcccatctgggcaaagattccacacacggacggacattttcacccctctcccctcatgggtggattcggacttaaacaccctcctccacagattctcatcaagaacaccccggtacctgcgaatccttcgaccaccttcagtgcggcaaagtttgcttccttcatcacacagtactccacgggacaggtcagcgtggagatcgagtgggagctgcagaaggaaaacagcaaacgctggaatcccgaaattcagtacacttccaactacaacaagtctgttaatgtggactttactgtggacactaatggcgtgtattcagagcctcgccccattggcaccagatacctgactcgtaatctgtaa

SEQ ID NO: 395 - DNA, 2211 bp, Artificial Sequence
  Description of Artificial Sequence: Synthetic polynucleotide
atggctgccgatggttatcttccagattggctcgaggacactctctctgaaggaataagacagtggtggaagctcaaacctggcccaccaccaccaaagcccgcagagcggcataaggacgacagcaggggtcttgtgcttcctgggtacaagtacctcggacccttcaacggactcgacaagggagagccggtcaacgaggcagacgccgcggccctcgagcacgacaaagcctacgaccggcagctcgacagcggagacaacccgtacctcaagtacaaccacgccgacgcggagtttcaggagcgccttaaagaagatacgtcttttgggggcaacctcggacgagcagtcttccaggcgaaaaagagggttcttgaacctctgggcctggttgaggaacctgttaagacggctccgggaaaaaagaggccggtagagcactctcctgtggagccagactcctcctcgggaaccggaaaggcgggccagcagcctgcaagaaaaagattgaattttggtcagactggagacgcagactcagtacctgacccccagcctctcggacagccaccagcagccccctctggtctgggaactaatacgatggctacaggcagtggcgcaccaatggcagacaataacgagggcgccgacggagtgggtaattcctcgggaaattggcattgcgattccacatggatgggcgacagagtcatcaccaccagcacccgaacctgggccctgcccacctacaacaaccacctctacaaacaaatttccagccaatcaggagcctcgaacgacaatcactactttggctacagcaccccttgggggtattttgacttcaacagattccactgccacttttcaccacgtgactggcaaagactcatcaacaacaactggggattccgacccaagagactcaacttcaagctctttaacattcaagtcaaagaggtcacgcagaatgacggtacgacgacgattgccaataaccttaccagcacggttcaggtgtttactgactcggagtaccagctcccgtacgtcctcggctcggcgcatcaaggatgcctcccgccgttcccagcagacgtcttcatggtgccacagtatggatacctcaccctgaacaacgggagtcaggcagtaggacgctcttcattttactgcctggagtactttccttctcagatgctgcgtaccggaaacaactttaccttcagctacacttttgaggacgttcctttccacagcagctacgctcacagccagagtctggaccgtctcatgaatcctctcatcgaccagtacctgtattacttgagcagaacaaacactattaacggttctggacagaatcaacaaacgcttcagttttctcaggccggagcgagtgacattcgggaccagtctaggaactggcttcctggaccctgttaccgccagcagcgagtatcaaagacatctgcggataacaacaacagtgaatactcgtggactggagctaccaagtaccacctcaatggcagagactctctggtgaatccgggcccggccatggcaagccacaaggacgatgaagaaaagttttttcctcagagcggggttctcatctttgggaagcaaggctcagagaaaacaaatgtggacattgaaaaggtcatgattacagacgaagaggaaatcaggacaaccaatcccgtggctacggagcagtatggttctgtatctaccaacctccagagaggcaacagacaagcagctaccgcagatgtcaacacacaaggcgttcttccaggcatggtctggcaggacagagatgtgtaccttcaggggcccatctgggcaaagattccacacacggacggacattttcacccctctcccctcatgggtggattcggacttaaacaccctcctccacagattctcatcaagaacaccccggtacctgcgaatccttcgaccaccttcagtgcggcaaagtttgcttccttcatcacacagtactccacgggacaggtcagcgtggagatcgagtgggagctgcagaaggaaaacagcaaacgctggaatcccgaaattcagtacacttccaactacaacaagtctgttaatgtggactttactgtggacactaatggcgtgtattcagagcctcgccccattggcaccagatacctgactcgtaatctgtaa

SEQ ID NO: 396 - DNA, 2205 bp, Artificial Sequence
  Description of Artificial Sequence: Synthetic polynucleotide
atggctgccgatggttatcttccagattggctcgaggacactctctctgaaggaataagacagtggtggaagctcaaacctggcccaccaccaccaaagcccgcagagcggcataaggacgacagcaggggtcttgtgcttcctgggtacaagtacctcggacccttcaacggactcgacaagggagagccggtcaacgaggcagacgccgcggccctcgagcacgacaaagcctacgaccggcagctcgacagcggagacaacccgtacctcaagtacaaccacgccgacgcggagtttcaggagcgccttaaagaagatacgtcttttgggggcaacctcggacgagcagtcttccaggcgaaaaagagggttcttgaacctctgggcctggttgaggaacctgttaagacggctccgggaaaaaagaggccggtagagcactctcctgtggagccagactcctcctcgggaaccggaaaggcgggccagcagcctgcaagaaaaagattgaattttggtcagactggagacgcagactcagtacctgacccccagcctctcggacagccaccagcagccccctctggtctgggaactaatacgatggctacaggcagtggcgcaccaatggcagacaataacgagggcgccgacggagtgggtaattcctcgggaaattggcattgcgattccacatggatgggcgacagagtcatcaccaccagcacccgaacctgggccctgcccacctacaacaaccacctctacaaacaaatttccagccaatcaggagcctcgaacgacaatcactactttggctacagcaccccttgggggtattttgacttcaacagattccactgccacttttcaccacgtgactggcaaagactcatcaacaacaactggggattccgacccaagagactcaacttcaagctctttaacattcaagtcaaagaggtcacgcagaatgacggtacgacgacgattgccaataaccttaccagcacggttcaggtgtttactgactcggagtaccagctcccgtacgtcctcggctcggcgcatcaaggatgcctcccgccgttcccagcagacgtcttcatggtgccacagtatggatacctcaccctgaacaacgggagtcaggcagtaggacgctcttcattttactgcctggagtactttccttctcagatgctgcgtaccggaaacaactttaccttcagctacacttttgaggacgttcctttccacagcagctacgctcacagccagagtctggaccgtctcatgaatcctctcatcgaccagtacctgtattacttgagcagaacaattaacggttctggacagaatcaacaaacgcttcagttttctcaggccggagcgagtgacattcgggaccagtctaggaactggcttcctggaccctgttaccgccagcagcgagtatcaaagacatctgcggataacaacaacagtgaatactcgtggactggagctaccaagtaccacctcaatggcagagactctctggtgaatccgggcccggccatggcaagccacaaggacgatgaagaaaagttttttcctcagagcggggttctcatctttgggaagcaaggctcagagaaaacaaatgtggacattgaaaaggtcatgattacagacgaagaggaaatcaggacaaccaatcccgtggctacggagcagtatggttctgtatctaccaacctccagagaggcaacagacaagcagctaccgcagatgtcaacacacaaggcgttcttccaggcatggtctggcaggacagagatgtgtaccttcaggggcccatctgggcaaagattccacacacggacggacattttcacccctctcccctcatgggtggattcggacttaaacaccctcctccacagattctcatcaagaacaccccggtacctgcgaatccttcgaccaccttcagtgcggcaaagtttgcttccttcatcacacagtactccacgggacaggtcagcgtggagatcgagtgggagctgcagaaggaaaacagcaaacgctggaatcccgaaattcagtacacttccaactacaacaagtctgttaatgtggactttactgtggacactaatggcgtgtattcagagcctcgccccattggcaccagatacctgactcgtaatctgtaa

SEQ ID NO: 397 - DNA, 2205 bp, Artificial Sequence
  Description of Artificial Sequence: Synthetic polynucleotide
atggctgccgatggttatcttccagattggctcgaggacactctctctgaaggaataagacagtggtggaagctcaaacctggcccaccaccaccaaagcccgcagagcggcataaggacgacagcaggggtcttgtgcttcctgggtacaagtacctcggacccttcaacggactcgacaagggagagccggtcaacgaggcagacgccgcggccctcgagcacgacaaagcctacgaccggcagctcgacagcggagacaacccgtacctcaagtacaaccacgccgacgcggagtttcaggagcgccttaaagaagatacgtcttttgggggcaacctcggacgagcagtcttccaggcgaaaaagagggttcttgaacctctgggcctggttgaggaacctgttaagacggctccgggaaaaaagaggccggtagagcactctcctgtggagccagactcctcctcgggaaccggaaaggcgggccagcagcctgcaagaaaaagattgaattttggtcagactggagacgcagactcagtacctgacccccagcctctcggacagccaccagcagccccctctggtctgggaactaatacgatggctacaggcagtggcgcaccaatggcagacaataacgagggcgccgacggagtgggtaattcctcgggaaattggcattgcgattccacatggatgggcgacagagtcatcaccaccagcacccgaacctgggccctgcccacctacaacaaccacctctacaaacaaatttccagccaatcaggagcctcgaacgacaatcactactttggctacagcaccccttgggggtattttgacttcaacagattccactgccacttttcaccacgtgactggcaaagactcatcaacaacaactggggattccgacccaagagactcaacttcaagctctttaacattcaagtcaaagaggtcacgcagaatgacggtacgacgacgattgccaataaccttaccagcacggttcaggtgtttactgactcggagtaccagctcccgtacgtcctcggctcggcgcatcaaggatgcctcccgccgttcccagcagacgtcttcatggtgccacagtatggatacctcaccctgaacaacgggagtcaggcagtaggacgctcttcattttactgcctggagtactttccttctcagatgctgcgtaccggaaacaactttaccttcagctacacttttgaggacgttcctttccacagcagctacgctcacagccagagtctggaccgtctcatgaatcctctcatcgaccagtacctgtattacttgagcagaacaaacactccaagtaccaccacgcagtcaaggcttcagttttctcaggccggagcgagtgacattcgggaccagtctaggaactggcttcctggaccctgttaccgccagcagcgagtatcaaagacatctgcggataacaacaacagtgaatactcgtggactggagctaccaagtaccacctcaatggcagagactctctggtgaatccgggcccggccatggcaagccacaaggacgatgaagaaaagttttttcctcagagcggggttctcatctttgggaagcaaggctcagagaaaacaaatgtggacattgaaaaggtcatgattacagacgaagaggaaatcaggacaaccaatcccgtggctacggagcagtatggttctgtatctaccaacctccagagaggcaacagacaagcagctaccgcagatgtcaacacacaaggcgttcttccaggcatggtctggcaggacagagatgtgtaccttcaggggcccatctgggcaaagattccacacacggacggacattttcacccctctcccctcatgggtggattcggacttaaacaccctcctccacagattctcatcaagaacaccccggtacctgcgaatccttcgaccaccttcagtgcggcaaagtttgcttccttcatcacacagtactccacgggacaggtcagcgtggagatcgagtgggagctgcagaaggaaaacagcaaacgctggaatcccgaaattcagtacacttccaactacaacaagtctgttaatgtggactttactgtggacactaatggcgtgtattcagagcctcgccccattggcaccagatacctgactcgtaatctgtaa

SEQ ID NO: 398 - protein, 735 aa, Artificial Sequence
  Description of Artificial Sequence: Synthetic polypeptide
MAADGYLPDWLEDTLSEGIRQWWKLKPGPPPPKPAERHKDDSRGLVLPGYKYLGPFNGLDKGEPVNEADAAALEHDKAYDRQLDSGDNPYLKYNHADAEFQERLKEDTSFGGNLGRAVFQAKKRVLEPLGLVEEPVKTAPGKKRPVEHSPVEPDSSSGTGKAGQQPARKRLNFGQTGDADSVPDPQPLGQPPAAPSGLGTNTMATGSGAPMADNNEGADGVGNSSGNWHCDSTWMGDRVITTSTRTWALPTYNNHLYKQISSQSGASNDNHYFGYSTPWGYFDFNRFHCHFSPRDWQRLINNNWGFRPKRLNFKLFNIQVKEVTQNDGTTTIANNLTSTVQVFTDSEYQLPYVLGSAHQGCLPPFPADVFMVPQYGYLTLNNGSQAVGRSSFYCLEYFPSQMLRTGNNFTFSYTFEDVPFHSSYAHSQSLDRLMNPLIDQYLYYLSRTQTTGGTANTQTLQFSQAGASDIRDQSRNWLPGPCYRQQRVSKTSADNNNSEYSWTGATKYHLNGRDSLVNPGPAMASHKDDEEKFFPQSGVLIFGKQGSEKTNVDIEKVMITDEEEIRTTNPVATEQYGSVSTNLQRGNRQAATADVNTQGVLPGMVWQDRDVYLQGPIWAKIPHTDGHFHPSPLMGGFGLKHPPPQILIKNTPVPANPSTTFSAAKFASFITQYSTGQVSVEIEWELQKENSKRWNPEIQYTSNYNKSVNVDFTVDTNGVYSEPRPIGTRYLTRNL

SEQ ID NO: 399 - protein, 735 aa, Artificial Sequence
  Description of Artificial Sequence: Synthetic polypeptide
MAADGYLPDWLEDTLSEGIRQWWKLKPGPPPPKPAERHKDDSRGLVLPGYKYLGPFNGLDKGEPVNEADAAALEHDKAYDRQLDSGDNPYLKYNHADAEFQERLKEDTSFGGNLGRAVFQAKKRVLEPLGLVEEPVKTAPGKKRPVEHSPVEPDSSSGTGKAGQQPARKRLNFGQTGDADSVPDPQPLGQPPAAPSGLGTNTMATGSGAPMADNNEGADGVGNSSGNWHCDSTWMGDRVITTSTRTWALPTYNNHLYKQISSQSGASNDNHYFGYSTPWGYFDFNRFHCHFSPRDWQRLINNNWGFRPKRLNFKLFNIQVKEVTQNDGTTTIANNLTSTVQVFTDSEYQLPYVLGSAHQGCLPPFPADVFMVPQYGYLTLNNGSQAVGRSSFYCLEYFPSQMLRTGNNFTFSYTFEDVPFHSSYAHSQSLDRLMNPLIDQYLYYLSRTQTTGGTTNTQTLQFSQAGASDIRDQSRNWLPGPCYRQQRVSKTSADNNNSEYSWTGATKYHLNGRDSLVNPGPAMASHKDDEEKFFPQSGVLIFGKQGSEKTNVDIEKVMITDEEEIRTTNPVATEQYGSVSTNLQRGNRQAATADVNTQGVLPGMVWQDRDVYLQGPIWAKIPHTDGHFHPSPLMGGFGLKHPPPQILIKNTPVPANPSTTFSAAKFASFITQYSTGQVSVEIEWELQKENSKRWNPEIQYTSNYNKSVNVDFTVDTNGVYSEPRPIGTRYLTRNL

SEQ ID NO: 400 - protein, 734 aa, Artificial Sequence
  Description of Artificial Sequence: Synthetic polypeptide
MAADGYLPDWLEDTLSEGIRQWWKLKPGPPPPKPAERHKDDSRGLVLPGYKYLGPFNGLDKGEPVNEADAAALEHDKAYDRQLDSGDNPYLKYNHADAEFQERLKEDTSFGGNLGRAVFQAKKRVLEPLGLVEEPVKTAPGKKRPVEHSPVEPDSSSGTGKAGQQPARKRLNFGQTGDADSVPDPQPLGQPPAAPSGLGTNTMATGSGAPMADNNEGADGVGNSSGNWHCDSTWMGDRVITTSTRTWALPTYNNHLYKQISSQSGASNDNHYFGYSTPWGYFDFNRFHCHFSPRDWQRLINNNWGFRPKRLNFKLFNIQVKEVTQNDGTTTIANNLTSTVQVFTDSEYQLPYVLGSAHQGCLPPFPADVFMVPQYGYLTLNNGSQAVGRSSFYCLEYFPSQMLRTGNNFTFSYTFEDVPFHSSYAHSQSLDRLMNPLIDQYLYYLSRTQTTGTGGTQTLQFSQAGASDIRDQSRNWLPGPCYRQQRVSKTSADNNNSEYSWTGATKYHLNGRDSLVNPGPAMASHKDDEEKFFPQSGVLIFGKQGSEKTNVDIEKVMITDEEEIRTTNPVATEQYGSVSTNLQRGNRQAATADVNTQGVLPGMVWQDRDVYLQGPIWAKIPHTDGHFHPSPLMGGFGLKHPPPQILIKNTPVPANPSTTFSAAKFASFITQYSTGQVSVEIEWELQKENSKRWNPEIQYTSNYNKSVNVDFTVDTNGVYSEPRPIGTRYLTRNL

SEQ ID NO: 401 - protein, 736 aa, Artificial Sequence
  Description of Artificial Sequence: Synthetic polypeptide
MAADGYLPDWLEDTLSEGIRQWWKLKPGPPPPKPAERHKDDSRGLVLPGYKYLGPFNGLDKGEPVNEADAAALEHDKAYDRQLDSGDNPYLKYNHADAEFQERLKEDTSFGGNLGRAVFQAKKRVLEPLGLVEEPVKTAPGKKRPVEHSPVEPDSSSGTGKAGQQPARKRLNFGQTGDADSVPDPQPLGQPPAAPSGLGTNTMATGSGAPMADNNEGADGVGNSSGNWHCDSTWMGDRVITTSTRTWALPTYNNHLYKQISSQSGASNDNHYFGYSTPWGYFDFNRFHCHFSPRDWQRLINNNWGFRPKRLNFKLFNIQVKEVTQNDGTTTIANNLTSTVQVFTDSEYQLPYVLGSAHQGCLPPFPADVFMVPQYGYLTLNNGSQAVGRSSFYCLEYFPSQMLRTGNNFTFSYTFEDVPFHSSYAHSQSLDRLMNPLIDQYLYYLSRTNTINGSGQNQQTLQFSQAGASDIRDQSRNWLPGPCYRQQRVSKTSADNNNSEYSWTGATKYHLNGRDSLVNPGPAMASHKDDEEKFFPQSGVLIFGKQGSEKTNVDIEKVMITDEEEIRTTNPVATEQYGSVSTNLQRGNRQAATADVNTQGVLPGMVWQDRDVYLQGPIWAKIPHTDGHFHPSPLMGGFGLKHPPPQILIKNTPVPANPSTTFSAAKFASFITQYSTGQVSVEIEWELQKENSKRWNPEIQYTSNYNKSVNVDFTVDTNGVYSEPRPIGTRYLTRNL

SEQ ID NO: 402 - protein, 734 aa, Artificial Sequence
  Description of Artificial Sequence: Synthetic polypeptide
MAADGYLPDWLEDTLSEGIRQWWKLKPGPPPPKPAERHKDDSRGLVLPGYKYLGPFNGLDKGEPVNEADAAALEHDKAYDRQLDSGDNPYLKYNHADAEFQERLKEDTSFGGNLGRAVFQAKKRVLEPLGLVEEPVKTAPGKKRPVEHSPVEPDSSSGTGKAGQQPARKRLNFGQTGDADSVPDPQPLGQPPAAPSGLGTNTMATGSGAPMADNNEGADGVGNSSGNWHCDSTWMGDRVITTSTRTWALPTYNNHLYKQISSQSGASNDNHYFGYSTPWGYFDFNRFHCHFSPRDWQRLINNNWGFRPKRLNFKLFNIQVKEVTQNDGTTTIANNLTSTVQVFTDSEYQLPYVLGSAHQGCLPPFPADVFMVPQYGYLTLNNGSQAVGRSSFYCLEYFPSQMLRTGNNFTFSYTFEDVPFHSSYAHSQSLDRLMNPLIDQYLYYLSRTINGSGQNQQTLQFSQAGASDIRDQSRNWLPGPCYRQQRVSKTSADNNNSEYSWTGATKYHLNGRDSLVNPGPAMASHKDDEEKFFPQSGVLIFGKQGSEKTNVDIEKVMITDEEEIRTTNPVATEQYGSVSTNLQRGNRQAATADVNTQGVLPGMVWQDRDVYLQGPIWAKIPHTDGHFHPSPLMGGFGLKHPPPQILIKNTPVPANPSTTFSAAKFASFITQYSTGQVSVEIEWELQKENSKRWNPEIQYTSNYNKSVNVDFTVDTNGVYSEPRPIGTRYLTRNL

SEQ ID NO: 403 - protein, 734 aa, Artificial Sequence
  Description of Artificial Sequence: Synthetic polypeptide
MAADGYLPDWLEDTLSEGIRQWWKLKPGPPPPKPAERHKDDSRGLVLPGYKYLGPFNGLDKGEPVNEADAAALEHDKAYDRQLDSGDNPYLKYNHADAEFQERLKEDTSFGGNLGRAVFQAKKRVLEPLGLVEEPVKTAPGKKRPVEHSPVEPDSSSGTGKAGQQPARKRLNFGQTGDADSVPDPQPLGQPPAAPSGLGTNTMATGSGAPMADNNEGADGVGNSSGNWHCDSTWMGDRVITTSTRTWALPTYNNHLYKQISSQSGASNDNHYFGYSTPWGYFDFNRFHCHFSPRDWQRLINNNWGFRPKRLNFKLFNIQVKEVTQNDGTTTIANNLTSTVQVFTDSEYQLPYVLGSAHQGCLPPFPADVFMVPQYGYLTLNNGSQAVGRSSFYCLEYFPSQMLRTGNNFTFSYTFEDVPFHSSYAHSQSLDRLMNPLIDQYLYYLSRTNTPSTTTQSRLQFSQAGASDIRDQSRNWLPGPCYRQQRVSKTSADNNNSEYSWTGATKYHLNGRDSLVNPGPAMASHKDDEEKFFPQSGVLIFGKQGSEKTNVDIEKVMITDEEEIRTTNPVATEQYGSVSTNLQRGNRQAATADVNTQGVLPGMVWQDRDVYLQGPIWAKIPHTDGHFHPSPLMGGFGLKHPPPQILIKNTPVPANPSTTFSAAKFASFITQYSTGQVSVEIEWELQKENSKRWNPEIQYTSNYNKSVNVDFTVDTNGVYSEPRPIGTRYLTRNL

SEQ ID NO: 404 - DNA, 2217 bp, Non-human primate Adeno-associated virus; identical to SEQ ID NO: 286

SEQ ID NO: 405 - DNA, 2202 bp, Adeno-associated virus
atggctgctgacggttatcttccagattggctcgaggacaacctctctgagggcattcgcgagtggtgggacctgaaacctggagccccgaagcccaaggccaaccagcagaagcaggacgacggccggggtctggtgcttcctggctacaagtacctcggacccttcaacggactcgacaagggggagcccgtcaacgcggcggacgcagcggccctcgagcacgacaaggcctacgaccagcagctcaaagcgggtgacaatccgtacctgcggtataaccacgccgacgccgagtttcaggagcgtctgcaagaagatacgtcttttgggggcaacctcgggcgagcagtcttccaggccaagaagagggtactcgaacctctgggcctggttgaagaaggtgctaaaacggctcctggaaagaagagaccgttagagtcaccacaagagcccgactcctcctcgggcatcggcaaaaaaggcaaacaaccagccagaaagaggctcaactttgaagaggacactggagccggagacggaccccctgaaggatcagataccagcgccatgtcttcagacattgaaatgcgtgcagcaccgggcggaaatgctgtcgatgcgggacaaggttccgatggagtgggtaatgcctcgggtgattggcattgcgattccacctggtctgagggcaaggtcacaacaacctcgaccagaacctgggtcttgcccacctacaacaaccacttgtacctgcgtctcggaacaacatcaagcagcaacacctacaacggattctccaccccctggggatattttgacttcaacagattccactgtcacttctcaccacgtgactggcaaagactcatcaacaacaactggggactacgaccaaaagccatgcgcgttaaaatcttcaatatccaagttaaggaggtcacaacgtcgaacggcgagactacggtcgctaataaccttaccagcacggttcagatatttgcggactcgtcgtatgagctcccgtacgtgatggacgctggacaagaggggagcctgcctcctttccccaatgacgtgttcatggtgcctcaatatggctactgtggcatcgtgactggcgagaatcagaaccaaacggacagaaacgctttctactgcctggagtattttccttcgcaaatgttgagaactggcaacaactttgaaatggcttacaactttgagaaggtgccgttccactcaatgtatgctcacagccagagcctggacagactgatgaatcccctcctggaccagtacctgtggcacttacagtcgactacctctggagagactctgaatcaaggcaatgcagcaaccacatttggaaaaatcaggagtggagactttgccttttacagaaagaactggctgcctgggccttgtgttaaacagcagagattctcaaaaactgccagtcaaaattacaagattcctgccagcgggggcaacgctctgttaaagtatgacacccactataccttaaacaaccgctggagcaacatcgcgcccggacctccaatggccacagccggaccttcggatggggacttcagtaacgcccagcttatattccctggaccatctgttaccggaaatacaacaacttcagccaacaatctgttgtttacatcagaagaagaaattgctgccaccaacccaagagacacggacatgtttggccagattgctgacaataatcagaatgctacaactgctcccataaccggcaacgtgactgctatgggagtgctgcctggcatggtgtggcaaaacagagacatttactaccaagggccaatttgggccaagatcccacacgcggacggacattttcatccttcaccgctgattggtgggtttggactgaaacacccgcctccccagatattcatcaagaacactcccgtacctgccaatcctgcgacaaccttcactgcagccagagtggactctttcatcacacaatacagcaccggccaggtcgctgttcagattgaatgggaaattgaaaaggaacgctccaaacgctggaatcctgaagtgcagtttacttcaaactatgggaaccagtcttctatgttgtgggctcctgatacaactgggaagtatacagagccgcgggttattggctctcgttatttgactaatcatttgtaa

SEQ ID NO: 406 - DNA, 2229 bp, Adeno-associated virus
atggctgctgacggttatcttccagattggctcgaggacaacctctctgaaggcattcgcgagtggtgggcgctgaaacctggagctccacaacccaaggccaaccaacagcatcaggacaacggcaggggtcttgtgcttcctgggtacaagtacctcggacccttcaacggactcgacaagggagagccggtcaacgaggcagacgccgcggccctcgagcacgacaaggcctacgacaagcagctcgagcagggggacaacccgtatctcaagtacaaccacgccgacgccgagttccagcagcgcttggcgaccgacacctcttttgggggcaacctcgggcgagcagtcttccaggccaaaaagaggattctcgagcctctgggtctggttgaagagggcgttaaaacggctcctggaaagaaacgcccattagaaaagactccaaatcggccgaccaacccggactctgggaaggccccggccaagaaaaagcaaaaagacggcgaaccagccgactctgctagaaggacactcgactttgaagactctggagcaggagacggaccccctgagggatcatcttccggagaaatgtctcatgatgctgagatgcgtgcggcgccaggcggaaatgctgtcgaggcgggacaaggtgccgatggagtgggtaatgcctccggtgattggcattgcgattccacctggtcagagggccgagtcaccaccaccagcacccgaacctgggtcctacccacgtacaacaaccacctgtacctgcgaatcggaacaacggccaacagcaacacctacaacggattctccaccccctggggatactttgactttaaccgcttccactgccacttttccccacgcgactggcagcgactcatcaacaacaactggggactcaggccgaaatcgatgcgtgttaaaatcttcaacatacaggtcaaggaggtcacgacgtcaaacggcgagactacggtcgctaataaccttaccagcacggttcagatctttgcggattcgacgtatgaactcccatacgtgatggacgccggtcaggaggggagctttcctccgtttcccaacgacgtctttatggttccccaatacggatactgcggagttgtcactggaaaaaaccagaaccagacagacagaaatgccttttactgcctggaatactttccatcccaaatgctaagaactggcaacaattttgaagtcagttaccaatttgaaaaagttcctttccattcaatgtacgcgcacagccagagcctggacagaatgatgaatcctttactggatcagtacctgtggcatctgcaatcgaccactaccggaaattcccttaatcaaggaacagctaccaccacgtacgggaaaattaccactggagactttgcctactacaggaaaaactggttgcctggagcctgcattaaacaacaaaaattttcaaagaatgccaatcaaaactacaagattcccgccagcgggggagacgcccttttaaagtatgacacgcataccactctaaatgggcgatggagtaacatggctcctggacctccaatggcaaccgcaggtgccggggactcggattttagcaacagccagctgatctttgccggacccaatccgagcggtaacacgaccacatcttcaaacaatttgttgtttacctcagaagaggagattgccacaacaaacccacgagacacggacatgtttggacagattgcagataataatcaaaatgccaccaccgcccctcacatcgctaacctggacgctatgggaattgttcccggaatggtctggcaaaacagagacatctactaccagggccctatttgggccaaggtccctcacacggacggacactttcacccttcgccgctgatgggaggatttggactgaaacacccgcctccacagattttcatcaaaaacacccccgtacccgccaatcccaatactacctttagcgctgcaaggattaattcttttctgacgcagtacagcaccggacaagttgccgttcagatcgactgggaaattcagaaggagcattccaaacgctggaatcccgaagttcaatttacttcaaactacggcactcaaaattctatgctgtgggctcccgacaatgctggcaactaccacgaactccgggctattgggtcccgtttcctcacccaccacttgtaa

SEQ ID NO: 407 - DNA, 2217 bp, Artificial Sequence
  Description of Artificial Sequence: Synthetic polynucleotide
atgtctctcatttctgatgcgattccagattggttggagcggttggtcaaaaagggagtgaatgctgcggctgatttctaccatttggaaagcggtcctcctcatcctaaggcaaatcagcaaactcaagaatctcctgaaaaggacgattcgagaggtctcgtgttcccgggttacaagtatctaggccctttcaacggtctagataaaggaaaacccgtcaacgaggcagacgctgccgccttagagcacgacaaggcttacgacctcgaactcaaggacgggcacaacccgtactttgagtacaacgaggccgatagacgtttccaggaacgtctcaaagacgatacctctttcggagggaatctcggtaaagccatctttcaggccaaaaagagggtcctcgagccctttggtctgattgaacaacccgacaacacggccgggaccggggagaagcgtcccgaacgcgtcgacgactttttcccgaaaaagaagaaggccaagaccgagcaaggcaaagcccctgctcaaacgggcgaagaccccggagaaggaacctcttccaacgctggatcaagcgccccctctagtgtgggatcatctgtcatggctgaaggaggtggcggtccaatgggcgatgcaggccaaggtgccgacggagtgggcaattcctcgggaaattggcattgcgattcccaatggctggacaacggagtcgttacccgaaccactcgaacctgggtcctgcccagctacaacaaccacttgtacaagcggatccaaggaccgggaggaaccgaccccaacaataaattctttggattcagcaccccctgggggtactttgactacaaccgattccactgccacttctccccccgagactggcaacgactcatcaacaacaactggggcatccgacccaaagcgatgcgctttagactctttaacatccaggttaaagaagtcactgtccaagactccaacaccaccatcgccaacaacctcaccagcacggtccaagtctttgcggacaaggactaccagctgccgtacgtcctcggatcggctacagagggcaccttcccgccgttcccagcggatatctacacgatcccgcagtatggttactgcacgctaaactacaacaacgaggcggtggatcgttcggccttctactgtctagactatttcccctcagacatgctgcggacaggaaataactttgaattcacttacacgttcgaggacgttcctttccatagcatgtttgctcacaaccagacgctagaccggctgatgaatcctctcgtcgatcagtacctgtgggctttcagttccgtcagccaaacaggctcgtctggacgggcactcaattattcacgcgcgaccaaaaccaatatggcaacccagtacagaaactggttacctggacccttcgtccgggatcagcaaatctttacgggggctagcaacatcacccaaaacaacgtgttcaacgtttgggataaaggcaagcagtgggtgatagacaatcggatcaatatgatgcagcccggccctgcagcagcgaccacctttagcggagaacccgaccgtcaagccatgcaaaacacgctggcctttagtcggacggtctacgaccagacaaccagtacgaccgatcgtaaccagttgctcattaccaacgaagatgaaatcagacccaccaactcggtcggcatcgacacgtggggagtagttcccaacaacaaccagtccaaggtgaccgccggcactcgcgcggccatcaacaaccaaggggcgcttcccgggatggtgtggcaaaacagagacatttacctccaaggacccatttgggccaaaatccccgacacagacaatcacttccatccgtccccgcttattggcgggtttggctgcaagcatccccctccccagattttcattaaaaacacacccgtcccggccaacccttcggaaacgttccagacggccaaggtggcctccttcatcaaccagtactcgaccggacagtgcaccgtcgaaatcttttgggaactcaagaaggaaacctccaagcgctggaaccccgaaatccagttcacctccaactttggcaacgcggccgacatccagtttgctgtctccgacaccggatcctattccgaacctcgtcccatcggtacccggtaccttaccaaacctctgtaa

SEQ ID NO: 408 - DNA, 2175 bp, Artificial Sequence
  Description of Artificial Sequence: Synthetic polynucleotide
atgtcgtttgtcgatcaccccccagactggctcgaggagatcggagaggggctctccgagttcatcggactagaggcgggaccgccgaagcctaagccgggctaccaggaccgcgcgcgcggcctcgtcgtccccggctacaagtacctcgggcccttcaacggactcgacaggggcgagcccgtcaacgcggccgacgcggcggccaagaagcacgacgaggagtacgaccggctcctcaaggcgggggacaacccgtacctcgcctacaaccacgcggacgccgagttccagaaggacctcagcggcgactccagcctagccggcaacgccgcgaacgcgctcttccaggccaagaagagggtcctcgagcccttcggactggtcgagggagagccggagcccaagaagacgccttccgtcaagaggccgcacgcatcgccggactcgtcgagcggcgtcgggaagaagggcgaccagcccgcgcggaagaggctcgactttgggacggagcccgcgggtcaagacggagcgggacgagcggcccaggcagccggagatatggcatctgctgaggtggctgcgggtggtggcggaccagtgggcgacgatgcacaaggtgccgatggagtgggtaatgcctcaggaaattggcattacgattccgtttggatggacggcgctgtcatcaccaagtccacccgaacctggagcctgcccgcctacaacaaccacctctaccgccagatccagtccagcggcaccggagacggcacgtactttggttacagcacgccttggggatacttcgatttcaatcgattccactgccacttttctcccagggactggcagcggctcatcaacaaccactggggcatccgccccaagcggctccactttaagctcttcaacatccaggtcaaggaggtcacgacgaccgacggcaccacgaccatcgccaacaacctcaccagcaccatacaggtctttgcggacacggagtaccagctcccgtacgtgctcggcaacgcccacgagggctgcctgccgccgttcccggcggacgtcttcatgctgccgcagtacgcgtacctgacgctcaacgccaaccccacgaaccagggcgcggccgcgctcagcctgccgcagagcgccttctactgcctggagtactttccgagccagatgctgaggaccgggaacaacttctcgttcagctacgagttcgagaagctgcccttccactcgatgttcatgcacagccagagcctggaccggctcatgaacccgctcatcgaccagtacctctggtacctcaacgccacgaccggcaacaacctctccttcaacaaggccggcgccaagaacttccccgagtacttccgcaactggctgcccgggcccggccagcgcgtgcagcagtggagcacgatcggaacccagaacaacgcgcagaccggcacgtgggccagcgccaacaagtggatcctcatgggcaggtccagcaagatggcccccgggctggcccagccggtcaggaacgcccagaccgtcaccaacggctcgcagctcatcttcaacaacgagaccatcaagggctccaccgcgacggcctccaccgtacactcggggctgctcgtcaccaacgagtcggagaccgccccgaccaaccccaactcggcgacaaagtggggcgtcatgacggacaaccagcagaccacctccactacgccgaccgtcagcgacgacctcgaggcgcacgtcttcccgggcatggtctggcaggaccgcgacatctacctgcagggcccgatatgggccaagatcccggagacggacggccacttccacccgtccccgctcatgggcggcttcgggctcaagaacccgccgccgcagatcctcgtcaagaacacgcccgtgcccgccgtgccgcccacgaccttcacaccgcagaaggtcaactccttcatcacgcagtactccaccggccaggtcaccgtcgagatcgagtgggagctgcgcaaggagaagagcaagcgctggaaccccgagatccagtacacctccaacttcgagaactcggccaacgtacagttctccgtcaacggcgacggcgcgtacatcgagccgcgaccgatcggaacccggtacctcacccacaacctgtaa

SEQ ID NO: 409 - DNA, 2211 bp, Artificial Sequence
  Description of Artificial Sequence: Synthetic polynucleotide
atgtcttttgttgaccaccctccagattggttggaatcgatcggcgacggctttcgtgaatttctcggccttgaggcgggtcccccgaaacccaaggccaatcaacagaagcaagataacgctcgaggtcttgtgcttcctgggtacaagtatcttggtcctgggaacggccttgataagggcgatcctgtcaattttgctgacgaggttgcccgagagcacgacctctcctaccagaaacagcttgaggcgggcgataacccttacctcaagtacaaccacgcggacgcagagtttcaggagaaactcgcttctgacacttcttttgggggaaaccttgggaaggctgttttccaggctaaaaagaggattctcgaacctcttggcctggttgagacgccggataaaacggcgcctgcggcaaaaaagaggcctctagagcagagtcctcaagagccagactcctcgagcggagttggcaagaaaggcaaacagcctgccagaaagagactcaactttgacgacgaacctggagccggagacgggcctcccccagaaggaccatcttccggagctatgtctactgagactgaaatgcgtgcagcagctggcggaaatggtggcgatgcgggacaaggtgccgagggagtgggtaatgcctccggtgattggcattgcgattccacttggtcagagagccacgtcaccaccacctcaacccgcacctgggtcctgccgacctacaacaaccacctgtacctgcggctcggctcgagcaacgccagcgacaccttcaacggattctccaccccctggggatactttgactttaaccgcttccactgccacttctcgccaagagactggcaaaggctcatcaacaaccactggggactgcgccccaaaagcatgcaagtccgcatcttcaacatccaagttaaggaggtcacgacgtctaacggggagacgaccgtatccaacaacctcaccagcacggtccagatctttgcggacagcacgtacgagctcccgtacgtgatggatgcaggtcaggagggcagcttgcctcctttccccaacgacgtgttcatggtgcctcagtacgggtactgcggactggtaaccggaggcagctctcaaaaccagacagacagaaatgccttctactgtctggagtactttcccagccagatgctgagaaccggaaacaactttgagatggtgtacaagtttgaaaacgtgcccttccactccatgtacgctcacagccagagcctggataggctgatgaacccgctgctggaccagtacctgtgggagctccagtctaccacctctggaggaactctcaaccagggcaattcagccaccaactttgccaagctgaccaaaacaaacttttctggctaccgcaaaaactggctcccggggcccatgatgaagcagcagagattctccaagactgccagtcaaaactacaagattccccagggaagaaacaacagtctgctccattatgagaccagaactaccctcgacggaagatggagcaattttgccccgggaacggccatggcaaccgcagccaacgacgccaccgacttctctcaggcccagctcatctttgcggggcccaacatcaccggcaacaccaccacagatgccaataacctgatgttcacttcagaagatgaacttagggccaccaacccccgggacactgacctgtttggccacctggcaaccaaccagcaaaacgccaccaccgttcctaccgtagacgacgtggacggagtcggcgtgtacccgggaatggtgtggcaggacagagacatttactaccaagggcccatttgggccaaaattccacacacggatggacactttcacccgtctcctctcattggcggatttggactgaaaagcccgcctccacaaatattcatcaaaaacactcctgtacccgccaatcccgcaacgaccttctctccggccagaatcaacagcttcatcacccagtacagcaccggacaggtggctgtcaaaatagaatgggaaatccagaaggagcggtccaagagatggaacccagaggtccagttcacgtccaactacggagcacaggactcgcttctctgggctcccgacaacgccggagcctacaaagagcccagggccattggatcccgatacctcaccaaccacctctag

SEQ ID NO: 410 - DNA, 2142 bp, Artificial Sequence
  Description of Artificial Sequence: Synthetic polynucleotide
atgtctttctttgattggttaggtaaacagtacgctcaaggagctgctgaattctgggatttgaagtccggtcctcctgcaccaaaaaaggcgcgaaaggacggatcagccggattcaatttccctgggcacaaatacctgggtcctggcaattcattggatcgcggagatcccgtggacgctgacgacgccgctgctcaaaagcacgaccagtcgtaccaagagcagcttgaggcgggagacaatccctacctcaagtacaaccacgccgaccgcgagttccaggaggcgttgaaggacgacacctcctttgaaggaaatctcgcgagaggactctttgaggccaagaagctcgtggcagagcctcttggtctcgtggaaccagaactggcgccacccagtggccgtaaacgaccggtgcaatcgagtcaagagtctggttactcgagtagccaagacaagcggcccaacctcgacgtagacgaggaggaccgtgagttcgctgccgctgcagcggagaccgaaactggaagcgctccccccaccggcaatttgggacctggtacgatggctggaggcggtagcgcgccaatcgacgacggctcgtatggtgccgatggagtgggcaatgcctcgggagattggcattgcgattccacatggctggacaactgtgtcatcacccgaaccactcggacctggaatctgccaacctacaacaaccacatctacaaacgactcaacggaacgacctccggagaccaaagctacttcggattcagcaccccctggggatactttgacttcaaccgcttccactgtcatttctcccctcgagactggcaaagactcatcaacaataactggggactccgaccaaagagcctacggttcaaaatctttaacattcaagttaaagaagtcacgacgcaagactcaacgaagatcatctccaataaccttaccagcacggttcaggtatttgcggacacggagtaccagctcccgtacgtgattggatcggctcacgaaggatgtctgcctcctttcccggctgacgtgttcatgctgccgcagtatggatactgtactcgacaagacggaaacagcaacaatccgaccccgagaagcgccttctattgtttggagtactttcccagcaagatgctaagaactgggaacagttttgaatttacatataactttgagaaggtgccgttccacagcatgtgggctcacaaccagagtctggatcgattgatgaatccattgattgatcagtacctgtactaccttgatgtcacttcgagtaccgggtttacctatcaaaaaggagttcacacgaacttgcccgaacaagagcgcaactggctgccgggaccaggaattcgaaatcaagcttggtttaattctgcaactggaaacaacccactaactggtacctggcaatattccaacaaatacgtacttgaaaaccgtgcttcgaagattgctcctggacctgccatgggaattgaatcaacaaaattcgacgggaacggaatcatcttttctaaagaatacatcaccaatgtaaatacagccaatccgaatcaagtaaacatcacacgcgagaccgaaataaactcaacgaaccccttggctggaggatctctcggagcccacgctaataattcacaaaacacaacaacggcaccgacgctagaccacaccaacgtcatgggtgtgtttccgggtagtgtctggcaagacagagacatttaccttcaaggacaaatctgggccaagattccccacacagacggacatttccacccttctcctctcatgggaggatttggactgaagaacccgcctcctcaaattctgatcaaaaacacacctgttccggctgacccaccaactgaattcaatgcgaacaaaatctcttctttcatcactcaatactcaaccggacaagttacagtggaaatggaatgggaacttcagaaagaaacctccaaaagatggaatccagaaatccagtacagcgacgactcgtcttcgacgtctggctccattctgcactttgctccggatgatgttggaaactacaaagagttccgctctatcggaactcgttaccttacccgtcctctgtaa

SEQ ID NO: 411 - DNA, 2205 bp, Artificial Sequence
  Description of Artificial Sequence: Synthetic polynucleotide
atgtcttttttcgattggataggtcgtaagtacgccaacggcgccgctgagttctgggatctcgagccgggtcctccgaagcccaaaaaggccagagtcgacgactcggccggcttcaacttccccgggcacaagtacttgggccccggcaacggtctcgaccgaggggagcccgtggatgccgacgacgcggcggcccagaaacacgaccaggaatatcaggctctgcttgagagcggtgagaatccttacctcacttttaatcacgctgatcggcagctgcagaaggacctcgcggaggaccaatctttcgaggggaacctcgcccggggtctgttcgaagccaagaagctcgcggcacaggtcgtaggcgtcgaggagccggagctggctcctccagtcaagcgtccacactcgcccgagaaaaccccagagaaccagaagggtcagccgcgaccggatccccggacgccggccaagaagaggctcgagttctccgatcagcctggatcttcagcagacttacctgcatcctcacaacagtcccagcctcccgcaggggttcccggtgtggttcctggtacgatgtctgcaggaggaggcgctccagtggacgatgctcaacaaggtgccgacggagtgggcaatgcctcgggagattggcattgcgattccaaatggctgggcaaccgagttctcacccgatccacccggacctgggtgctgcccagctacaacaaccacctgtacaagcagatctcagacgcctccggcgtgcacagcctccccgggagccgatactttggctacagcaccccctgggggtacttcgacttcaatcgcttccactgccacttctcgcccagagactggcagcgcctcgtcaataaccactggggcttccgacccaagagactgcgagtcaaactcttcaacatccaggtcaaggaggtcacgactactgattcgacgaccacggtctccaacaacctcacgagcacggtccaggtcttcacagacgacgagtaccagctgccgtacgtctgcggcaacgccaccgagggatgcctgccgccgttccccccggacgtcttcacgctgccgcagtacggctacgcgacgctgaacgacagcaacaatggcaaccccaccaacagatcgagcttcttctgtctggaatactttcccagcaagatgctgagaaccgggaacaactttgaatttaccttcgagtttgaagacgtgcccttccacacgggcttcgccccctgtcagaacctgttcaagctgagcaatcccctggtggaccagtacctgtaccgcttccagggtactgacaactcctccagcagcacgcccggggtggtcaagttcgagaaatgcgtggcccacaactacgcccagcagtacaagaactggctgaccggtgctttccagaggaaccaggactataactacgtgtctggtactagcaactacaagggcgtggttggatctaatcagaataacctgcagcgcatagagaatgtgcagttcgccattgctccggacgtgcccagcatgtgtaaccatctggagggcaccaatatgatcgctctggacaacagcctgatcttccgggatgtctctaccgcccctggtgacacgactcagtataacatcaaccaggtgatcgtgaccagcgaagccgagactcaatctgtcaatgcgtactcgggcgacacctgtggccgcattgtgaataacagccagaatagcggaaccaacgctgggaccaccggcatcaactacaaaggtaccatgccgtcctcggtctggatggaccgtgacgtctacctgcagggcccgatctgggccaagattccccacacgggggcgcactttcacccgtctcccatgatggggggcttcggcctgaggaaccctcctccgatgatgctgatcaagaacacgcccgttcctggcaacgtgaccaccttcaccgaggtcaaggttaaccagttcatcacccagtactcgaccgggcagatcaccgtggacgtggaatgggagctgcagaaggagaactccaaacgatggaaccccgagatccagtacacaaataactacagtaataatacttttgtggactttgcccccaatgctaatggagattaccagatgacccgccccattggaacccgctacccgacccgccccccgtaa

SEQ ID NO: 412 - DNA, 2157 bp, Artificial Sequence
  Description of Artificial Sequence: Synthetic polynucleotide
atgtcttctttgtttaaagagtacctgcagagtaccggactggtgggtatccagtcgggagcgccgaagccaaaggccggccagcagaagcaggatacagggtcctttgagtggaaaaagaaggaggacacagccagagggctggtccttcccggttacaagtacctcgggcccttcaacggtctagagcggggcgagcctgtgaatgccgcggacgccgcggcccagcgacacgaccgacagtacgatcgtattctacaacaagggggtaatccatacctcacgtacaaccacgccgaccgagagttccaggaggagctccagtctgacgagtcttttgggggaaatcttggcaaggctgtgtttcaggccaagaagcgaatcctagagcccctcggtctggttgaagaggatccctctcagccagattcgtcctcggacaacacggcgccacccgtgaaaaagtcccgtctcgaagaagcccagcccattcaaagtccagacgtttccagcagcactggcggaggaattgccgacgtcatgtctggagatgctgaaatggctgcagtgggcgggggagcaccgggcgtcgacggccagggtgccgagggagtgggtacttcctcgggtaattggcattgcgattcccagtggtcagaaggacacgtcagaaccaccagcaccagaacctgggtgttgcccagctacaacaaccacctgtataaacggcttggaagtagcgcacaatccaatacctacaacggattctccaccccctggggatacctcgacttcaatagatggcactgtcacttcagtcctcggaactggcaacgtctcatcaacaacaactggggcatcagaccaaaaagacttaatgttaaattgttcaacatacaagtcaaagaggtcacgacggaaggggggacgacgaccgtcgccaataaccttaccagcacgattcaggtgtttgcggacaacgcgtacgaactcccgtatgttgtcgacgcgggtcacgagggggcattgccgccgttcccaaacgacgtgtttatgattccccaatacggatactgcgggctggtgtctggtcaaagtcagaatcagtcggacttgtgttcgttttattgcctggagtattttccatcccagatgctgagaacaggaaacaattttgaaatgaatttcaggtttgaagacgttccatttcactccatgtacgcccacagccagtctctagacaggctcatgaatcctttaattgatcagtatctgtggagtctaaaacaaacaggaaacccgactggatcaacaacgagagacttaaaatttatcaagaacaaagttcccaattttgcacattatggaaaaaattggcttcctggaccttttattagacaacaggggtggacaacacaaaatattaataatagtgttgttaattttaatgacatgctgggaaaaaattcgacatttactttggacactagatggagttcattagcgcctggtccgtgtatgggggatgacggacgaactccatccaccaccaagttctcaaatgctcagctcatgtttggatctggaacacaacccaccgaaggcggtgaagatgctgtacatattacatccgagtcggaggtcaaggcaaccaacccaactgcaatcgatgaatacggacgagtggccgataatacgcaaaatgcaacaaccgccccaaccacagtgggaaatgctgcaatgggggccatgcctgggatggtgtggcaagatagggatatctatcttcaaggacccatctggggaaaaataccccatacagacggacattttcatccgtctcctctcatgggggggtttggatacagaaaaccccctccgcaaatttttattaaaaacacccccgttcctggaaatccggcaactacattttctccaaatagaataaacaatttcattactcaatactcaacgggacaagtgaccgttactattgactgggagctgcaaaaggaaaactcaaagagatggaacccagaagtacaatttacatcaaattttggcacggtcgattcactaaactgggcaccggacaacgcgggaaactacaaagaaccaagggtggtggggtctcgattccttacgcatatactataa

SEQ ID NO: 413 - DNA, 2181 bp, Artificial Sequence
  Description of Artificial Sequence: Synthetic polynucleotide
atggattttctcgatgatttctttgcagataaatataaagagactgttaacgaactcggtaaaccggtcaatcctaaacctgtaaaacacattagcgaagctcactcgcaacctggcagcaggaggggctttgtggtgcctgggtatcggtatcttgggcctggtaatagcttggaccgtggaaagcccgttaacaaagcagacgaggctgctaaaaagcacgatcaagaatacgatcaacagcttaaagcgggagacaatccctacataaaatataatcacgcggacgaacagttccagaaagacctacaaggtgataccagtctagccggcaacgcggctaacgctctatttcaaggcaaaaagactctactagcgccccttggcctagtagagacccctgtcggcaaaacgtctgaaaagcacaaattagacgaatactatcctaaagctaaaaaggccaaacaaggcttgcagataccagctccacctaaaggcggagaagaagaagctacatcgtcacaatctggagggagcccagcaggttccgatactagcggcacatctgtcatggctacaggaggaggcggtccgatggcagacgataaccagggcgccgagggagtgggtaattcctcaggtgattggcattgcgataccaagtggatgggagaccacgtcattacaaagtcaaccagaacttgggtgctccccacttacgggaatcatctctacgggcctatcaactttgacggcaccacaggttcgggtgctaatgcagcctatgcaggatacaagactccctgggggtactttgacttcaatcgattccattgccacttctccccccgagactggcaaagactcatcaacaaccacacaggcatcaggccgaaaggactcaaaatcaaagtctttaacgtccaagtcaaagaagttacaacacaagattcaacgaaaacaattgccaacaatctcaccagcaccgtacagatctttgcggacgagaactacgacttaccatatgtattaggcagtgctacacaaggcacatttcctccatttcccaatgatgtatttatgttaccacaatatgcttattgtacacttcaaggaaattcggggaaatttgtagatagaagtgccttttattgtttagaatattttccttcacaaatgctgagaacaggaaacaattttgagttccagtttaaatttgaagaagttccctttcattctggatgggcacagagtcaaagcctagacagattgatgaatccgttgcttgatcaatatctgataggagactatggaacagatgcatcaggaaaccttatttatcacagagctggtccaaatgatttgaatgaattctacaagaattgggcacctgcaccctatgaatgtatccagaatattaacagcagtgataataccaagaatgctaattctataaatggttcaaattctaccaacaaatggggactacaaggaagacaagcatgggatgctccaggatttgttcaagctagtacctatgaaggtgcagcagcaggacaatctcttcttaatggcgtacttactttcgataaaagttcagctactacttcatctccagctgctactgcagtaaacagaacaattgaagacgaaatacagggtaccaataattttggtaatgctagaaataacattgttgctatcaatcaacaaacgaaaggaacaaatccaacaacaggtagtacatctcaatttgagacaatgccaggtatggtgtggtctaatagagacatttacttacaggggcctatttgggctaaaattccaaatacagatggacattttcatccttctcccagaatgggtggttttggattaaaacatcctccgcctatgattctgatcaaaaatacaccagttcctgctgatcctccaactaccttcaatccaatgccacagactagtttcattactgaatacagtacaggacaagtaactgttgaaatgttgtgggaggtacagaaagaatcctccaaaagatggaatccagaagtacagtttacttccaattttggaacttcagatccagctgttgatggaataccgtttggaattaataatttgggtacttatgttgaatctagacctattggaactcgttatatttctaaacacttgtaa

SEQ ID NO: 414 - protein, 738 aa, Non-human primate Adeno-associated virus
MAADGYLPDWLEDNLSEGIREWWDLKPGAPKPKANQQKQDDGRGLVLPGYKYLGPFNGLDKGEPVNAADAAALEHDKAYDQQLKAGDNPYLRYNHADAEFQERLQEDTSFGGNLGRAVFQAKKRVLEPLGLVEEGAKTAPGKKRPVEPSPQRSPDSSTGIGKKGQQPAKKRLNFGQTGDSESVPDPQPIGEPPAGPSGLGSGTMAAGGGAPMADNNEGADGVGSSSGNWHCDSTWLGDRVITTSTRTWALPTYNNHLYKQISNGTSGGSTNDNTYFGYSTPWGYFDFNRFHCHFSPRDWQRLINNNWGFRPKRLNFKLFNIQVKEVTQNEGTKTIANNLTSTIQVFTDSEYQLPYVLGSAHQGCLPPFPADVFMIPQYGYLTLNNGSQAVGRSSFYCLEYFPSQMLRTGNNFEFSYQFEDVPFHSSYAHSQSLDRLMNPLIDQYLYYLSRTQSTGGTAGTQQLLFSQAGPNNMSAQAKNWLPGPCYRQQRVSTTLSQNNNSNFAWTGATKYHLNGRDSLVNPGVAMATHKDDEERFFPSSGVLMFGKQGAGKDNVDYSSVMLTSEEEIKTTNPVATEQYGVVADNLQQQNAAPIVGAVNSQGALPGMVWQNRDVYLQGPIWAKIPHTDGNFHPSPLMGGFGLKHPPPQILIKNTPVPADPPTTFSQAKLASFITQYSTGQVSVEIEWELQKENSKRWNPEIQYTSNYYKSTNVDFAVNTDGTYSEPRPIGTRYLTRNL

SEQ ID NO: 415 - protein, 733 aa, Adeno-associated virus
MAADGYLPDWLEDNLSEGIREWWDLKPGAPKPKANQQKQDDGRGLVLPGYKYLGPFNGLDKGEPVNAADAAALEHDKAYDQQLKAGDNPYLRYNHADAEFQERLQEDTSFGGNLGRAVFQAKKRVLEPLGLVEEGAKTAPGKKRPLESPQEPDSSSGIGKKGKQPARKRLNFEEDTGAGDGPPEGSDTSAMSSDIEMRAAPGGNAVDAGQGSDGVGNASGDWHCDSTWSEGKVTTTSTRTWVLPTYNNHLYLRLGTTSSSNTYNGFSTPWGYFDFNRFHCHFSPRDWQRLINNNWGLRPKAMRVKIFNIQVKEVTTSNGETTVANNLTSTVQIFADSSYELPYVMDAGQEGSLPPFPNDVFMVPQYGYCGIVTGENQNQTDRNAFYCLEYFPSQMLRTGNNFEMAYNFEKVPFHSMYAHSQSLDRLMNPLLDQYLWHLQSTTSGETLNQGNAATTFGKIRSGDFAFYRKNWLPGPCVKQQRFSKTASQNYKIPASGGNALLKYDTHYTLNNRWSNIAPGPPMATAGPSDGDFSNAQLIFPGPSVTGNTTTSANNLLFTSEEEIAATNPRDTDMFGQIADNNQNATTAPITGNVTAMGVLPGMVWQNRDIYYQGPIWAKIPHADGHFHPSPLIGGFGLKHPPPQIFIKNTPVPANPATTFTAARVDSFITQYSTGQVAVQIEWEIEKERSKRWNPEVQFTSNYGNQSSMLWAPDTTGKYTEPRVIGSRYLTNHL

SEQ ID NO: 416 - protein, 742 aa, Adeno-associated virus
MAADGYLPDWLEDNLSEGIREWWALKPGAPQPKANQQHQDNGRGLVLPGYKYLGPFNGLDKGEPVNEADAAALEHDKAYDKQLEQGDNPYLKYNHADAEFQQRLATDTSFGGNLGRAVFQAKKRILEPLGLVEEGVKTAPGKKRPLEKTPNRPTNPDSGKAPAKKKQKDGEPADSARRTLDFEDSGAGDGPPEGSSSGEMSHDAEMRAAPGGNAVEAGQGADGVGNASGDWHCDSTWSEGRVTTTSTRTWVLPTYNNHLYLRIGTTANSNTYNGFSTPWGYFDFNRFHCHFSPRDWQRLINNNWGLRPKSMRVKIFNIQVKEVTTSNGETTVANNLTSTVQIFADSTYELPYVMDAGQEGSFPPFPNDVFMVPQYGYCGVVTGKNQNQTDRNAFYCLEYFPSQMLRTGNNFEVSYQFEKVPFHSMYAHSQSLDRMMNPLLDQYLWHLQSTTTGNSLNQGTATTTYGKITTGDFAYYRKNWLPGACIKQQKFSKNANQNYKIPASGGDALLKYDTHTTLNGRWSNMAPGPPMATAGAGDSDFSNSQLIFAGPNPSGNTTTSSNNLLFTSEEEIATTNPRDTDMFGQIADNNQNATTAPHIANLDAMGIVPGMVWQNRDIYYQGPIWAKVPHTDGHFHPSPLMGGFGLKHPPPQIFIKNTPVPANPNTTFSAARINSFLTQYSTGQVAVQIDWEIQKEHSKRWNPEVQFTSNYGTQNSMLWAPDNAGNYHELRAIGSRFLTHHL

SEQ ID NO: 417 - protein, 738 aa, Artificial Sequence
  Description of Artificial Sequence: Synthetic polypeptide
MSLISDAIPDWLERLVKKGVNAAADFYHLESGPPHPKANQQTQESPEKDDSRGLVFPGYKYLGPFNGLDKGKPVNEADAAALEHDKAYDLELKDGHNPYFEYNEADRRFQERLKDDTSFGGNLGKAIFQAKKRVLEPFGLIEQPDNTAGTGEKRPERVDDFFPKKKKAKTEQGKAPAQTGEDPGEGTSSNAGSSAPSSVGSSVMAEGGGGPMGDAGQGADGVGNSSGNWHCDSQWLDNGVVTRTTRTWVLPSYNNHLYKRIQGPGGTDPNNKFFGFSTPWGYFDYNRFHCHFSPRDWQRLINNNWGIRPKAMRFRLFNIQVKEVTVQDSNTTIANNLTSTVQVFADKDYQLPYVLGSATEGTFPPFPADIYTIPQYGYCTLNYNNEAVDRSAFYCLDYFPSDMLRTGNNFEFTYTFEDVPFHSMFAHNQTLDRLMNPLVDQYLWAFSSVSQTGSSGRALNYSRATKTNMATQYRNWLPGPFVRDQQIFTGASNITQNNVFNVWDKGKQWVIDNRINMMQPGPAAATTFSGEPDRQAMQNTLAFSRTVYDQTTSTTDRNQLLITNEDEIRPTNSVGIDTWGVVPNNNQSKVTAGTRAAINNQGALPGMVWQNRDIYLQGPIWAKIPDTDNHFHPSPLIGGFGCKHPPPQIFIKNTPVPANPSETFQTAKVASFINQYSTGQCTVEIFWELKKETSKRWNPEIQFTSNFGNAADIQFAVSDTGSYSEPRPIGTRYLTKPL

SEQ ID NO: 418 - protein, 724 aa, Artificial Sequence
  Description of Artificial Sequence: Synthetic polypeptide
MSFVDHPPDWLEEIGEGLSEFIGLEAGPPKPKPGYQDRARGLVVPGYKYLGPFNGLDRGEPVNAADAAAKKHDEEYDRLLKAGDNPYLAYNHADAEFQKDLSGDSSLAGNAANALFQAKKRVLEPFGLVEGEPEPKKTPSVKRPHASPDSSSGVGKKGDQPARKRLDFGTEPAGQDGAGRAAQAAGDMASAEVAAGGGGPVGDDAQGADGVGNASGNWHYDSVWMDGAVITKSTRTWSLPAYNNHLYRQIQSSGTGDGTYFGYSTPWGYFDFNRFHCHFSPRDWQRLINNHWGIRPKRLHFKLFNIQVKEVTTTDGTTTIANNLTSTIQVFADTEYQLPYVLGNAHEGCLPPFPADVFMLPQYAYLTLNANPTNQGAAALSLPQSAFYCLEYFPSQMLRTGNNFSFSYEFEKLPFHSMFMHSQSLDRLMNPLIDQYLWYLNATTGNNLSFNKAGAKNFPEYFRNWLPGPGQRVQQWSTIGTQNNAQTGTWASANKWILMGRSSKMAPGLAQPVRNAQTVTNGSQLIFNNETIKGSTATASTVHSGLLVTNESETAPTNPNSATKWGVMTDNQQTTSTTPTVSDDLEAHVFPGMVWQDRDIYLQGPIWAKIPETDGHFHPSPLMGGFGLKNPPPQILVKNTPVPAVPPTTFTPQKVNSFITQYSTGQVTVEIEWELRKEKSKRWNPEIQYTSNFENSANVQFSVNGDGAYIEPRPIGTRYLTHNL

SEQ ID NO: 419 - protein, 736 aa, Artificial Sequence
  Description of Artificial Sequence: Synthetic polypeptide
MSFVDHPPDWLESIGDGFREFLGLEAGPPKPKANQQKQDNARGLVLPGYKYLGPGNGLDKGDPVNFADEVAREHDLSYQKQLEAGDNPYLKYNHADAEFQEKLASDTSFGGNLGKAVFQAKKRILEPLGLVETPDKTAPAAKKRPLEQSPQEPDSSSGVGKKGKQPARKRLNFDDEPGAGDGPPPEGPSSGAMSTETEMRAAAGGNGGDAGQGAEGVGNASGDWHCDSTWSESHVTTTSTRTWVLPTYNNHLYLRLGSSNASDTFNGFSTPWGYFDFNRFHCHFSPRDWQRLINNHWGLRPKSMQVRIFNIQVKEVTTSNGETTVSNNLTSTVQIFADSTYELPYVMDAGQEGSLPPFPNDVFMVPQYGYCGLVTGGSSQNQTDRNAFYCLEYFPSQMLRTGNNFEMVYKFENVPFHSMYAHSQSLDRLMNPLLDQYLWELQSTTSGGTLNQGNSATNFAKLTKTNFSGYRKNWLPGPMMKQQRFSKTASQNYKIPQGRNNSLLHYETRTTLDGRWSNFAPGTAMATAANDATDFSQAQLIFAGPNITGNTTTDANNLMFTSEDELRATNPRDTDLFGHLATNQQNATTVPTVDDVDGVGVYPGMVWQDRDIYYQGPIWAKIPHTDGHFHPSPLIGGFGLKSPPPQIFIKNTPVPANPATTFSPARINSFITQYSTGQVAVKIEWEIQKERSKRWNPEVQFTSNYGAQDSLLWAPDNAGAYKEPRAIGSRYLTNHL

SEQ ID NO: 420 - protein, 726 aa, Artificial Sequence
  Description of Artificial Sequence: Synthetic polypeptide
MSFVDHPPDWLEEVGEGLREFLGLEAGPPKPKPNQQHQDQARGLVLPGYNYLGPGNGLDRGEPVNRADEVAREHDISYNEQLEAGDNPYLKYNHADAEFQEKLADDTSFGGNLGKAVFQAKKRVLEPFGLVEEGAKTAPTGKRIDDHFPKRKKARTEEDSKPSTSSDAEAGPSGSQQLQIPAQPASSLGADTMSAGGGGPLGDNNQGADGVGNASGDWHCDSTWMGDRVVTKSTRTWVLPSYNNHQYREIKSGSVDGSNANAYFGYSTPWGYFDFNRFHSHWSPRDWQRLINNYWGFRPRSLRVKIFNIQVKEVTVQDSTTTIANNLTSTVQVFTDDDYQLPYVVGNGTEGCLPAFPPQVFTLPQYGYATLNRDNGDNPTERSSFFCLEYFPSKMLRTGNNFEFTYSFEEVPFHCSFAPSQNLFKLANPLVDQYLYRFVSTSATGAIQFQKNLAGRYANTYKNWFPGPMGRTQGWNTSSGSSTNRVSVNNFSVSNRMNLEGASYQVNPQPNGMTNTLQGSNRYALENTMIFNAQNATPGTTSVYPEDNLLLTSESETQPVNRVAYNTGGQMATNAQNATTAPTVGTYNLQEVLPGSVWMERDVYLQGPIWAKIPETGAHFHPSPAMGGFGLKHPPPMMLIKNTPVPGNITSFSDVPVSSFITQYSTGQVTVEMEWELKKENSKRWNPEIQYTNNYNDPQFVDFAPDGSGEYRTTRAIGTRYLTRPL

SEQ ID NO: 421 - protein, 713 aa, Artificial Sequence
  Description of Artificial Sequence: Synthetic polypeptide
MSFFDWLGKQYAQGAAEFWDLKSGPPAPKKARKDGSAGFNFPGHKYLGPGNSLDRGDPVDADDAAAQKHDQSYQEQLEAGDNPYLKYNHADREFQEALKDDTSFEGNLARGLFEAKKLVAEPLGLVEPELAPPSGRKRPVQSSQESGYSSSQDKRPNLDVDEEDREFAAAAAETETGSAPPTGNLGPGTMAGGGSAPIDDGSYGADGVGNASGDWHCDSTWLDNCVITRTTRTWNLPTYNNHIYKRLNGTTSGDQSYFGFSTPWGYFDFNRFHCHFSPRDWQRLINNNWGLRPKSLRFKIFNIQVKEVTTQDSTKIISNNLTSTVQVFADTEYQLPYVIGSAHEGCLPPFPADVFMLPQYGYCTRQDGNSNNPTPRSAFYCLEYFPSKMLRTGNSFEFTYNFEKVPFHSMWAHNQSLDRLMNPLIDQYLYYLDVTSSTGFTYQKGVHTNLPEQERNWLPGPGIRNQAWFNSATGNNPLTGTWQYSNKYVLENRASKIAPGPAMGIESTKFDGNGIIFSKEYITNVNTANPNQVNITRETEINSTNPLAGGSLGAHANNSQNTTTAPTLDHTNVMGVFPGSVWQDRDIYLQGQIWAKIPHTDGHFHPSPLMGGFGLKNPPPQILIKNTPVPADPPTEFNANKISSFITQYSTGQVTVEMEWELQKETSKRWNPEIQYSDDSSSTSGSILHFAPDDVGNYKEFRSIGTRYLTRPL

SEQ ID NO: 422 - protein, 727 aa, Artificial Sequence
  Description of Artificial Sequence: Synthetic polypeptide
MSFVDHPPDWLEEVGEGLHEFLELEAGPPKPKPNQQKQDNARGLVLPGYNYLGPFNGLDKGEPVNRADAVAREHDISYNEQLQAGDNPYLKYNHADAEFQEKLKDDTSFGGNLGKAIFQAKKRVLEPFGLVEAPVKTAPAKKRPIEKSPAEPSSSKGIGKAGQQPARKRLNFGQTGDTDSAADPQPLGEPPAAPSGLGTGTMASGGGAPMADNNEGADGVGNASGNWHCDSTWLGDRVITTSTRTWALPTYNNHLYKQISSSNYGANNDNHYFGYSTPWGYFDFNRFHCHFSPRDWQRLINNNWGFRPKRLNFKLFNIQVKEVTETDGTKTIANNLTSTVQVFADSEYQLPYVLGSAHQGCFPPFPADVFMIPQYGYLTLNNGSQAMGRSSFYCLEYFPSQMLRTGNNFTFSYTFEDVPFHSSYAHSQSLDRLMNPLIDQYLYYLSKTAGGLAFSQAGPTTMRNQSRNWLPGPCFRQQRVSERSTENNNGDFSWTGTTRYHLNGRDSAMNPGPAMASHKDDEDRFFPQNGVLIFGTPNATASNAPLENVLITDEEEIRTTNPVATEEYGIVANNKQDSSTQATTAIVNAQGILPGMVWQDRDVYLQGPIWAKIPHTDGHFHPSPLMGGFGLKHPPPQILIKNTPVPSNPPEKFTQEKLNAFITQYSTGQVSVEIEWELQKENSKRWNPEVQYTSNYNKSVNVDFTVDTNGMYSEPRTIGTRYLTRNL

SEQ ID NO: 423 - protein, 734 aa, Artificial Sequence
  Description of Artificial Sequence: Synthetic polypeptide
MSFFDWIGRKYANGAAEFWDLEPGPPKPKKARVDDSAGFNFPGHKYLGPGNGLDRGEPVDADDAAAQKHDQEYQALLESGENPYLTFNHADRQLQKDLAEDQSFEGNLARGLFEAKKLAAQVVGVEEPELAPPVKRPHSPEKTPENQKGQPRPDPRTPAKKRLEFSDQPGSSADLPASSQQSQPPAGVPGVVPGTMSAGGGAPVDDAQQGADGVGNASGDWHCDSKWLGNRVLTRSTRTWVLPSYNNHLYKQISDASGVHSLPGSRYFGYSTPWGYFDFNRFHCHFSPRDWQRLVNNHWGFRPKRLRVKLFNIQVKEVTTTDSTTTVSNNLTSTVQVFTDDEYQLPYVCGNATEGCLPPFPPDVFTLPQYGYATLNDSNNGNPTNRSSFFCLEYFPSKMLRTGNNFEFTFEFEDVPFHTGFAPCQNLFKLSNPLVDQYLYRFQGTDNSSSSTPGVVKFEKCVAHNYAQQYKNWLTGAFQRNQDYNYVSGTSNYKGVVGSNQNNLQRIENVQFAIAPDVPSMCNHLEGTNMIALDNSLIFRDVSTAPGDTTQYNINQVIVTSEAETQSVNAYSGDTCGRIVNNSQNSGTNAGTTGINYKGTMPSSVWMDRDVYLQGPIWAKIPHTGAHFHPSPMMGGFGLRNPPPMMLIKNTPVPGNVTTFTEVKVNQFITQYSTGQITVDVEWELQKENSKRWNPEIQYTNNYSNNTFVDFAPNANGDYQMTRPIGTRYPTRPP

SEQ ID NO: 424 - protein, 718 aa, Artificial Sequence
  Description of Artificial Sequence: Synthetic polypeptide
MSSLFKEYLQSTGLVGIQSGAPKPKAGQQKQDTGSFEWKKKEDTARGLVLPGYKYLGPFNGLERGEPVNAADAAAQRHDRQYDRILQQGGNPYLTYNHADREFQEELQSDESFGGNLGKAVFQAKKRILEPLGLVEEDPSQPDSSSDNTAPPVKKSRLEEAQPIQSPDVSSSTGGGIADVMSGDAEMAAVGGGAPGVDGQGAEGVGTSSGNWHCDSQWSEGHVRTTSTRTWVLPSYNNHLYKRLGSSAQSNTYNGFSTPWGYLDFNRWHCHFSPRNWQRLINNNWGIRPKRLNVKLFNIQVKEVTTEGGTTTVANNLTSTIQVFADNAYELPYVVDAGHEGALPPFPNDVFMIPQYGYCGLVSGQSQNQSDLCSFYCLEYFPSQMLRTGNNFEMNFRFEDVPFHSMYAHSQSLDRLMNPLIDQYLWSLKQTGNPTGSTTRDLKFIKNKVPNFAHYGKNWLPGPFIRQQGWTTQNINNSVVNFNDMLGKNSTFTLDTRWSSLAPGPCMGDDGRTPSTTKFSNAQLMFGSGTQPTEGGEDAVHITSESEVKATNPTAIDEYGRVADNTQNATTAPTTVGNAAMGAMPGMVWQDRDIYLQGPIWGKIPHTDGHFHPSPLMGGFGYRKPPPQIFIKNTPVPGNPATTFSPNRINNFITQYSTGQVTVTIDWELQKENSKRWNPEVQFTSNFGTVDSLNWAPDNAGNYKEPRVVGSRFLTHIL

SEQ ID NO: 425 - protein, 726 aa, Artificial Sequence
  Description of Artificial Sequence: Synthetic polypeptide
MDFLDDFFADKYKETVNELGKPVNPKPVKHISEAHSQPGSRRGFVVPGYRYLGPGNSLDRGKPVNKADEAAKKHDQEYDQQLKAGDNPYIKYNHADEQFQKDLQGDTSLAGNAANALFQGKKTLLAPLGLVETPVGKTSEKHKLDEYYPKAKKAKQGLQIPAPPKGGEEEATSSQSGGSPAGSDTSGTSVMATGGGGPMADDNQGAEGVGNSSGDWHCDTKWMGDHVITKSTRTWVLPTYGNHLYGPINFDGTTGSGANAAYAGYKTPWGYFDFNRFHCHFSPRDWQRLINNHTGIRPKGLKIKVFNVQVKEVTTQDSTKTIANNLTSTVQIFADENYDLPYVLGSATQGTFPPFPNDVFMLPQYAYCTLQGNSGKFVDRSAFYCLEYFPSQMLRTGNNFEFQFKFEEVPFHSGWAQSQSLDRLMNPLLDQYLIGDYGTDASGNLIYHRAGPNDLNEFYKNWAPAPYECIQNINSSDNTKNANSINGSNSTNKWGLQGRQAWDAPGFVQASTYEGAAAGQSLLNGVLTFDKSSATTSSPAATAVNRTIEDEIQGTNNFGNARNNIVAINQQTKGTNPTTGSTSQFETMPGMVWSNRDIYLQGPIWAKIPNTDGHFHPSPRMGGFGLKHPPPMILIKNTPVPADPPTTFNPMPQTSFITEYSTGQVTVEMLWEVQKESSKRWNPEVQFTSNFGTSDPAVDGIPFGINNLGTYVESRPIGTRYISKHL

SEQ ID NO: 426 - protein, 737 aa, Artificial Sequence
  Description of Artificial Sequence: Synthetic polypeptide
MAADGYLPDWLEDNLSEGIREWWALKPGAPKPKANQQHQDDGRGLVLPGYKYLGPFNGLDKGEPVNAADAAALEHDKAYDQQLKAGDNPYLKYNHADAEFQERLQEDTSFGGNLGRAVFQAKKRLLEPLGLVEEGAKTAPGKKRPVEPSPQEPDSSTGIGKKGQQPARKRLNFGQTGDSESVPDPQPLGEPPAAPSGLGSNTMAAGGGAPMADNNEGADGVGSSSGNWHCDSTWLGDRVITTSTRTWALPTYNNHLYKQISNSTSGGSTNDNTYFGYSTPWGYFDFNRFHCHFSPRDWQRLINNNWGFRPKRLSFKLFNIQVKEVTQNEGTKTIANNLTSTVQVFTDSDYQLPYVLGSAHQGCLPPFPADVFMIPQYGYLTLNNGSQAVGRSSFYCLEYFPSQMLRTGNNFQFSYTFEDVPFHSSYAHSQSLDRLMNPLIDQYLYYLSKTQTTGGTAGTQTLAFSQAGPSTMANQAKNWLPGPCYRQQRVSTTVGQNNNSNFAWTGATKYHLNGRDSLVNPGVAMATHKDDEEKFFPSSGVLIFGKQGAGKDNVDYSSVMITDEEEIKTTNPVATEEYGVVADNLQQAQTAPQTGAVNTQGALPGMVWQNRDVYLQGPIWAKIPHTDGNFHPSPLMGGFGLKHPPPQILIKNTPVPADPPTTFNQAKLNSFITQYSTGQVSVEIEWELQKENSKRWNPEIQYTSNYYKSTNVDFAVNTEGVYSEPRPIGTRYLTRNL

SEQ ID NO: 427 - protein, 737 aa, Artificial Sequence
  Description of Artificial Sequence: Synthetic polypeptide
MAADGYLPDWLEDTLSEGIRQWWDLKPGAPKPKANEQHQDDGRGLVLPGYKYLGPFNGLDKGEPVNAADAAALEHDKAYDQQLKSGDNPYLKYNHADAEFQERLKEDTSFGGNLGRAVFQAKKRVLEPLGLVEEGAKTAPGKKRPVEQSPQEPDSSSGIGKSGQQPARKRLNFGQTGDSDSVPDPQPLGQPPAAPSGLGTNTMATGSGAPMADNNEGADGVGNSSGNWHCDSTWMGDRVITTSTRTWALPTYNNHLYKQISNGSSGGSSNDNTYFGYSTPWGYFDFNRFHCHFSPRDWQRLINNNWGFRPKRLNFKLFNIQVKEVTQNDGTKTIANNLTSTVQVFTDSEYQLPYVLGSAHQGCLPPFPADVFMVPQYGYLTLNNGSQAVGRSSFYCLEYFPSQMLRTGNNFQFSYTFEDVPFHSSYAHSQSLDRLMNPLIDQYLYYLSRTNTTSGTTGQQTLAFSQAGPSDIADQARNWLPGPCYRQQRVSTTVAQNNNSEYAWTGATKYHLNGRDSLVNPGPAMASHKDDEEKFFPSSGVLIFGKQGAGKDNVDISKVMITDEEEIRTTNPVATEQYGVVSTNLQSANAQAQTGAVNNQGVLPGMVWQDRDVYLQGPIWAKIPHTDGNFHPSPLMGGFGLKHPPPQILIKNTPVPANPPTTFSQAKFASFITQYSTGQVSVEIEWELQKENSKRWNPEIQYTSNYYKSTNVDFAVDTNGVYSEPRPIGTRYLTRNL

SEQ ID NO: 428 - protein, 737 aa, Artificial Sequence
  Description of Artificial Sequence: Synthetic polypeptide
MAADGYLPDWLEDNLSEGIREWWALKPGAPKPKANEQHQDDSRGLVLPGYKYLGPFNGLDKGEPVNAADAAALEHDKAYDQQLKSGDNPYLKYNHADAEFQERLKEDTSFGGNLGRAVFQAKKRVLEPLGLVEEAAKTAPGKKRPVEQSPQEPDSSSGIGKSGQQPARKRLNFGQTGDSDSVPDPQPLGQPPAAPSGLGTNTMATGSGAPMADNNEGADGVGNSSGNWHCDSTWMGDRVITTSTRTWALPTYNNHLYKQISSSTSGGSSNDNAYFGYSTPWGYFDFNRFHCHFSPRDWQRLINNNWGFRPKRLNFKLFNIQVKEVTQNDGTKTIANNLTSTVQVFTDSEYQLPYVLGSAHQGCLPPFPADVFMVPQYGYLTLNNGSQAVGRSSFYCLEYFPSQMLRTGNNFEFSYTFEDVPFHSSYAHSQSLDRLMNPLIDQYLYYLSRTNTTSGSAGQQTLKFSQPGPSDISAQSRNWLPGPCYRQQRVSTTVSDNNNSEFSWTGATKYHLNGRDSLVNPGPAMASHKDDEEKFFPSSGVLIFGKQGSGKDNVDIEKVMITDEEEIRTTNPVATEQYGQVSTNLQSGNAQAQTAAVNTQGVLPGMVWQDRDVYLQGPIWAKIPHTDGNFHPSPLMGGFGLKHPPPQILIKNTPVPANPPTTFSKAKFASFITQYSTGQVSVEIEWELQKENSKRWNPEIQYTSNYYKSTNVDFAVDTNGVYSEPRPIGTRYLTRNL

SEQ ID NO: 429 - protein, 533 aa, Artificial Sequence
  Description of Artificial Sequence: Synthetic consensus sequence
MAAGGGAPMADNNEGADGVGNSSGNWHCDSTWLGDRVITTSTRTWALPTYNNHLYKQISSGSGGASNDNAYFGYSTPWGYFDFNRFHCHFSPRDWQRLINNNWGFRPKRLNFKLFNIQVKEVTQNDGTTTIANNLTSTVQVFTDSEYQLPYVLGSAHQGCLPPFPADVFMIPQYGYLTLNNGSQAVGRSSFYCLEYFPSQMLRTGNNFQFSYTFEEVPFHSSYAHSQSLDRLMNPLIDQYLYYLSRTQNTGGTQNQQTLFSQAGPSGMAVQYKNWLPGPCYRQQRVSKTSTQNNNSNFAWTGASKYHLNGRNSLVNPGPAMASHKDDEEKFFPLSGVLIFGKQGAGRDNVDYDKVMITSEEEIKTTNPVATEQYGQVATNLQSSNTAPATGTVNAQGILPGMVWQDRDVYLQGPIWAKIPHTDGHFHPSPLMGGFGLKHPPPQILIKNTPVPANPPTTFSAAKFASFITQYSTGQVSVEIEWELQKENSKRWNPEIQYTSNYYKSQNVDFAVDTEGVYSEPRPIGTRYLTRNL

SEQ ID NO: 430 - protein, 533 aa, Adeno-associated virus; identical to SEQ ID NO: 24

SEQ ID NO: 431 - protein, 534 aa, Adeno-associated virus
MASGGGAPMADNNEGADGVGNASGNWHCDSTWLGDRVITTSTRTWALPTYNNHLYKQISSASTGASNDNHYFGYSTPWGYFDFNRFHCHFSPRDWQRLINNNWGFRPKRLNFKLFNIQVKEVTTNDGVTTIANNLTSTVQVFSDSEYQLPYVLGSAHQGCLPPFPADVFMIPQYGYLTLNNGSQAVGRSSFYCLEYFPSQMLRTGNNFTFSYTFEEVPFHSSYAHSQSLDRLMNPLIDQYLYYLNRTQNQSGSAQNKDLLFSRGSPAGMSVQPKNWLPGPCYRQQRVSKTKTDNNNSNFTWTGASKYNLNGRESIINPGTAMASHKDDEDKFFPMSGVMIFGKESAGASNTALDNVMITDEEEIKATNPVATERFGTVAVNFQSSSTDPATGDVHAMGALPGMVWQDRDVYLQGPIWAKIPHTDGHFHPSPLMGGFGLKNPPPQILIKNTPVPANPPAEFSATKFASFITQYSTGQVSVEIEWELQKENSKRWNPEVQYTSNYAKSANVDFTVDNNGLYTEPRPIGTRYLTRPL

SEQ ID NO: 432 - protein, 532 aa, Adeno-associated virus
MSAGGGGPLGDNNQGADGVGNASGDWHCDSTWMGDRVVTKSTRTWVLPSYNNHQYREIKSGSVDGSNANAYFGYSTPWGYFDFNRFHSHWSPRDWQRLINNYWGFRPRSLRVKIFNIQVKEVTVQDSTTTIANNLTSTVQVFTDDDYQLPYVVGNGTEGCLPAFPPQVFTLPQYGYATLNRDNTENPTERSSFFCLEYFPSKMLRTGNNFEFTYNFEEVPFHSSFAPSQNLFKLANPLVDQYLYRFVSTNNTGGVQFNKNLAGRYANTYKNWFPGPMGRTQGWNLGSGVNRASVSAFATTNRMELEGASYQVPPQPNGMTNNLQGSNTYALENTMIFNSQPANPGTTATYLEGNMLITSESETQPVNRVAYNVGGQMATNNQSSTTAPATGTYNLQEIVPGSVWMERDVYLQGPIWAKIPETGAHFHPSPAMGGFGLKHPPPMMLIKNTPVPGNITSFSDVPVSSFITQYSTGQVTVEMEWELKKENSKRWNPEIQYTNNYNDPQFVDFAPDSTGEYRTTRPIGTRYLTRPL

SEQ ID NO: 433 - protein, 535 aa, Adeno-associated virus
MAAGGGAPMADNNEGADGVGSSSGNWHCDSTWLGDRVITTSTRTWALPTYNNHLYKQISNGTSGGATNDNTYFGYSTPWGYFDFNRFHCHFSPRDWQRLINNNWGFRPKRLSFKLFNIQVKEVTQNEGTKTIANNLTSTIQVFTDSEYQLPYVLGSAHQGCLPPFPADVFMIPQYGYLTLNNGSQAVGRSSFYCLEYFPSQMLRTGNNFQFTYTFEDVPFHSSYAHSQSLDRLMNPLIDQYLYYLSRTQTTGGTANTQTLGFSQGGPNTMANQAKNWLPGPCYRQQRVSTTTGQNNNSNFAWTAGTKYHLNGRNSLANPGIAMATHKDDEERFFPSNGILIFGKQNAARDNADYSDVMLTSEEEIKTTNPVATEEYGIVADNLQQQNTAPQIGTVNSQGALPGMVWQNRDVYLQGPIWAKIPHTDGNFHPSPLMGGFGLKHPPPQILIKNTPVPADPPTTFNQSKLNSFITQYSTGQVSVEIEWELQKENSKRWNPEIQYTSNYYKSTSVDFAVNTEGVYSEPRPIGTRYLTRNL

SEQ ID NO: 434 - protein, 534 aa, Adeno-associated virus
MASGGGAPVADNNEGADGVGSSSGNWHCDSQWLGDRVITTSTRTWALPTYNNHLYKQISNSTSGGSSNDNAYFGYSTPWGYFDFNRFHCHFSPRDWQRLINNNWGFRPKRLNFKLFNIQVKEVTDNNGVKTIANNLTSTVQVFTDSDYQLPYVLGSAHEGCLPPFPADVFMIPQYGYLTLNDGSQAVGRSSFYCLEYFPSQMLRTGNNFQFSYEFENVPFHSSYAHSQSLDRLMNPLIDQYLYYLSKTINGSGQNQQTLKFSVAGPSNMAVQGRNYIPGPSYRQQRVSTTVTQNNNSEFAWPGASSWALNGRNSLMNPGPAMASHKEGEDRFFPLSGSLIFGKQGTGRDNVDADKVMITNEEEIKTTNPVATESYGQVATNHQSAQAQAQTGWVQNQGILPGMVWQDRDVYLQGPIWAKIPHTDGNFHPSPLMGGFGMKHPPPQILIKNTPVPADPPTAFNKDKLNSFITQYSTGQVSVEIEWELQKENSKRWNPEIQYTSNYYKSNNVEFAVNTEGVYSEPRPIGTRYLTRNL

SEQ ID NO: 435 - protein, 735 aa, Adeno-associated virus [sequence omitted]

SEQ ID NO: 436 - protein, 736 aa, Adeno-associated virus; identical to SEQ ID NO: 331

SEQ ID NO: 437 - protein, 736 aa, Adeno-associated virus
MAADGYLPDWLEDNLSEGIREWWDLKPGAPKPKANQQKQDDGRGLVLPGYKYLGPFNGLDKGEPVNAADAAALEHDKAYDQQLKAGDNPYLRYNHADAEFQERLQEDTSFGGNLGRAVFQAKKRVLEPLGLVEEGAKTAPGKKRPVEQSPQEPDSSSGIGKTGQQPAKKRLNFGQTGDSESVPDPQPLGEPPAAPSGLGPNTMASGGGAPMADNNEGADGVGNSSGNWHCDSTWLGDRVITTSTRTWALPTYNNHLYKQISNGTSGGSTNDNTYFGYSTPWGYFDFNRFHCHFSPRDWQRLINNNWGFRPKRLNFKLFNIQVKEVTTNEGTKTIANNLTSTVQVFTDSEYQLPYVLGSAHQGCLPPFPADVFMVPQYGYLTLNNGSQALGRSSFYCLEYFPSQMLRTGNNFQFSYTFEDVPFHSSYAHSQSLDRLMNPLIDQYLYYLVRTQTTGTGGTQTLAFSQAGPSSMANQARNWVPGPCYRQQRVSTTTNQNNNSNFAWTGAAKFKLNGRDSLMNPGVAMASHKDDDDRFFPSSGVLIFGKQGAGNDGVDYSQVLITDEEEIKATNPVATEEYGAVAINNQAANTQAQTGLVHNQGVIPGMVWQNRDVYLQGPIWAKIPHTDGNFHPSPLMGGFGLKHPPPQILIKNTPVPADPPLTFNQAKLNSFITQYSTGQVSVEIEWELQKENSKRWNPEIQYTSNYYKSTNVDFAVNTEGVYSEPRPIGTRYLTRNL

SEQ ID NO: 438 - protein, 738 aa, Adeno-associated virus; identical to SEQ ID NO: 414

SEQ ID NO: 439 - protein, 738 aa, Adeno-associated virus
MAADGYLPDWLEDNLSEGIREWWALKPGAPKPKANQQKQDDGRGLVLPGYKYLGPFNGLDKGEPVNAADAAALEHDKAYDQQLKAGDNPYLRYNHADAEFQERLQEDTSFGGNLGRAVFQAKKRVLEPLGLVEEAAKTAPGKKRPVEPSPQRSPDSSTGIGKKGQQPAKKRLNFGQTGDSESVPDPQPIGEPPAGPSGLGSGTMAAGGGAPMADNNEGADGVGSSSGNWHCDSTWLGDRVITTSTRTWALPTYNNHLYKQISNGTSGGSTNDNTYFGYSTPWGYFDFNRFHCHFSPRDWQRLINNNWGFRPKRLSFKLFNIQVKEVTQNEGTKTIANNLTSTIQVFTDSEYQLPYVLGSAHQGCLPPFPADVFMIPQYGYLTLNNGSQAVGRSSFYCLEYFPSQMLRTGNNFEFSYTFEDVPFHSSYAHSQSLDRLMNPLIDQYLYYLSRTQSTGGTQGTQQLLFSQAGPANMSAQAKNWLPGPCYRQQRVSTTLSQNNNSNFAWTGATKYHLNGRDSLVNPGVAMATHKDDEERFFPSSGVLMFGKQGAGRDNVDYSSVMLTSEEEIKTTNPVATEQYGVVADNLQQTNTGPIVGNVNSQGALPGMVWQNRDVYLQGPIWAKIPHTDGNFHPSPLMGGFGLKHPPPQILIKNTPVPADPPTTFSQAKLASFITQYSTGQVSVEIEWELQKENSKRWNPEIQYTSNYYKSTNVDFAVNTEGTYSEPRPIGTRYLTRNL

SEQ ID NO: 440 - protein, 738 aa, Adeno-associated virus
MAADGYLPDWLEDNLSEGIREWWALKPGAPKPKANQQKQDDGRGLVLPGYKYLGPFNGLDKGEPVNAADAAALEHDKAYDQQLQAGDNPYLRYNHADAEFQERLQEDTSFGGNLGRAVFQAKKRVLEPLGLVEEGAKTAPGKKRPVEPSPQRSPDSSTGIGKKGQQPARKRLNFGQTGDSESVPDPQPLGEPPAAPSGVGPNTMAAGGGAPMADNNEGADGVGSSSGNWHCDSTWLGDRVITTSTRTWALPTYNNHLYKQISNGTSGGATNDNTYFGYSTPWGYFDFNRFHCHFSPRDWQRLINNNWGFRPKRLSFKLFNIQVKEVTQNEGTKTIANNLTSTIQVFTDSEYQLPYVLGSAHQGCLPPFPADVFMIPQYGYLTLNNGSQAVGRSSFYCLEYFPSQMLRTGNNFQFTYTFEDVPFHSSYAHSQSLDRLMNPLIDQYLYYLSRTQTTGGTANTQTLGFSQGGPNTMANQAKNWLPGPCYRQQRVSTTTGQNNNSNFAWTAGTKYHLNGRNSLANPGIAMATHKDDEERFFPSNGILIFGKQNAARDNADYSDVMLTSEEEIKTTNPVATEEYGIVADNLQQQNTAPQIGTVNSQGALPGMVWQNRDVYLQGPIWAKIPHTDGNFHPSPLMGGFGLKHPPPQILIKNTPVPADPPTTFNQSKLNSFITQYSTGQVSVEIEWELQKENSKRWNPEIQYTSNYYKSTSVDFAVNTEGVYSEPRPIGTRYLTRNL

SEQ ID NO: 441 - protein, 736 aa, Adeno-associated virus
MAADGYLPDWLEDNLSEGIREWWDLKPGAPKPKANQQKQDDGRGLVLPGYKYLGPFNGLDKGEPVNAADAAALEHDKAYDQQLEAGDNPYLRYNHADAEFQERLQEDTSFGGNLGRAVFQAKKRVLEPLGLVEEGAKTAPGKKRPVEQSPQEPDSSSGIGKKGQQPARKRLNFGQTGDSESVPDPQPLGEPPAAPSGVGPNTMAAGGGAPMADNNEGADGVGSSSGNWHCDSTWLGDRVITTSTRTWALPTYNNHLYKQISNGTSGGATNDNTYFGYSTPWGYFDFNRFHCHFSPRDWQRLINNNWGFRPKRLSFKLFNIQVKEVTQNEGTKTIANNLTSTIQVFTDSEYQLPYVLGSAHQGCLPPFPADVFMIPQYGYLTLNNGSQAVGRSSFYCLEYFPSQMLRTGNNFQFTYTFEDVPFHSSYAHSQSLDRLMNPLIDQYLYYLSRTQTTGGTANTQTLGFSQGGPNTMANQAKNWLPGPCYRQQRVSTTTGQNNNSNFAWTAGTKYHLNGRNSLANPGIAMATHKDDEERFFPVTGSCFWQQNAARDNADYSDVMLTSEEEIKTTNPVATEEYGIVADNLQQQNTAPQIGTVNSQGALPGMVWQNRDVYLQGPIWAKIPHTDGNFHPSPLMGGFGLKHPPPQILIKNTPVPADPPTTFNQSKLNSFITQYSTGQVSVEIEWELQKENSKRWNPEIQYTSNYYKSTSVDFAVNTEGVYSEPRPIGTRYLTRNL

SEQ ID NO: 442 - protein, 738 aa, Adeno-associated virus
MAADGYLPDWLEDNLSEGIREWWDLKPGAPKPKANQQKQDNGRGLVLPGYKYLGPFNGLDKGEPVNAADAAALEHDKAYDQQLKAGDNPYLRYNHADAEFQERLQEDTSFGGNLGRAVFQAKKRVLEPLGLVEEGAKTAPAKKRPVEPSPQRSPDSSTGIGKKGQQPARKRLNFGQTGDSESVPDPQPLGEPPAAPSSVGSGNTVAAGGGAPMADNNEGADGVGNASGNWHCDSTWLGDRVITTSTRTWALPTYNNHLYKQISSETAGSTNDNTYFGYSTPWGYFDFNRFHCHFSPRDWQRLINNNWGFRPKKLRFKLFNIQVKEVTTNDGVTTIANNLTSTIQVFSDSEYQLPYVLGSAHQGCLPPFPADVFMIPQYGYLTLNNGSQSVGRSSFYCLEYFPSQMLRTGNNFEFSYSFEDVPFHSSYAHSQSLDRLMNPLIDQYLYYLARTQSNPGGTAGNRELQFYQGGPSTMAEQAKNWLPGPCFRQQRVSKTLDQNNNSNFAWTGATKYHLNGRNSLVNPGVAMATHKDDEDRFFPSSGVLIFGKTGATNKTTLENVLMTNEEEIRPTNPVATEEYGIVSSNLQAANTAAQTQVVNNQGALPGMVWQNRDVYLQGPIWAKIPHTDGNFHPSPLMGGFGLKHPPPQILIKNTPVPANPPEVFTPAKFASFITQYSTGQVSVEIEWELQKENSKRWNPEIQYTSNFEKQTGVDFAVDSQGVYSEPRPIGTRYLTRNL

SEQ ID NO: 443 - protein, 8 aa, Artificial Sequence
  Description of Artificial Sequence: Synthetic peptide
NGTSGGAT

SEQ ID NO: 444 - protein, 7 aa, Artificial Sequence
  Description of Artificial Sequence: Synthetic peptide
NSTSGGS

SEQ ID NO: 445 - protein, 8 aa, Artificial Sequence
  Description of Artificial Sequence: Synthetic peptide
NGTSGGST

SEQ ID NO: 446 - protein, 11 aa, Artificial Sequence
  Description of Artificial Sequence: Synthetic peptide
QTTGGTANTQT

SEQ ID NO: 447 - protein, 10 aa, Artificial Sequence
  Description of Artificial Sequence: Synthetic peptide
INGSGQNQQT

SEQ ID NO: 448 - protein, 11 aa, Artificial Sequence
  Description of Artificial Sequence: Synthetic peptide
QTTGGTTNTQT

SEQ ID NO: 449 - protein, 11 aa, Artificial Sequence
  Description of Artificial Sequence: Synthetic peptide
QSTGGTAGTQQ

SEQ ID NO: 450 - protein, 10 aa, Artificial Sequence
  Description of Artificial Sequence: Synthetic peptide
QTTGTGGTQT
